United States Patent Application Publication US 2023/0235365 A1 - sequence listing, part 6

SEQ ID NO: 14316 - RNA, 975 nt, synthetic construct
  source 1..975: mol_type = other RNA
atggatctgaaattgctgaatacactcatcgataatgaatacatcatcaacgactactgtagcggcgaagtcactttaaagttcgattttaccatcttggatgttgacaggttttgtatacccaagagaaataaggagctaggacacagggtgatatacaaaccaatgagcgaatccctgaagaattgcctgaagatcctcaacattaatctcaatggtatttacagccccccgatctcagccaccggctttatcaaaggacgtggcataaaatccaatgccgaaaagcatcttaagaagaagtatatcctgtccattgacatcaacaacttcttcgagacaatcaacaaggaaatggtaattgaggttcttaaagactatgggttcatcgaggagatagcactcaaaattagcaaaatcgtcactatcaacgacaaacttgtgcagggctttcatacatctcccactcttgctaacatgatattcaagaagatcgacttgattttcgaaaagctggacgaaaatattgagtatagtaggtacgcggacgacctcaccttctcctcagattctgagattacctacctctctaagataacagaaatcattgaatcgttcgggttcgagattaacaataagaagaccaagatcatgaagagaggacagaatcagtatgtgacggggctgacggtgtttgatgaacaatatccacgaattcctaagcggattaaaaaaaagctaagactggaggtctattacattaacaaatatggactgcggaaccacactttaaaaaagatgaaagtgaactggaaggatttctttggggatgagctgataaaaaaaaaggttgagaacatggagggtttggtccacgactacatctacggctggctggtgtttatcaatggtattgagcctgtgtttagtgaaaaatgctttgagctgatgcgcacccgcaaaatcgatgtatga

SEQ ID NO: 14317 - RNA, 1089 nt, synthetic construct
  source 1..1089: mol_type = other RNA
atgtatattccatccgagatcaataacgttaacaagttggccggcgtgctgaggtgtgaaatctcccagatagacaacctcgtgaacaaggtggtgcccagatccgaatttggcgaactgtttgagaaggtgcattttgatggcctgcccttccatttcgaggtgagtatgccagaggattttatactagagataaaactgcctaagcgtaaagtgcacctggggtatcgaaccgtttactctgtgttacctcacttcgccagctctgctctgaaagtgctcaagttttacttaaacgacctttatgtcccaaatgattgcgtgcatggattcattaagaaacggaatatcgtgacaaacgcacgcatgcacctgaataaaaagctcatactgaatgtcgacatcaagaacttcttcgagtcaatcaatctggatatggtcagaggggtttacgaaaagctgggtttccagaaggacattgccgaaatcctgtcaaatattacgacactaaatggacggctcgtcgcggggttcagcactagtcccgtgattgcaaacttgtactgtaatgagatggatgaagagttgatgcacgtatgctcacaaaacaatattacttacacgaggtatgctgacgatatcaccttttccggagacaaaattgacattctgagcgacgtcggagaaattctgaggcgctatgggtttgagatcaataagtcgaaaaccaggtactattacagaggtaacggtcagtatgtcacaggccttagcgtcgaggataccgttaaacctcgcgtaccgaaatacgtaaaaaaacgcttgcgtgccgagatttactccatctgtaagtacggcctcaagtctaacgttgcgcggatcttaggaatcgacgagggcggggtagacgaaactatgctcaaaaagcgagcagccaagatcattggctggctcagcttcatcagcagtatagagtacaagttcgctaaagattgctttgatcaccttcttagaatcgacaacgcccgggattcatattatatcatgaacgctctggaacatgtgagttctaagattaagaggttttga

SEQ ID NO: 14318 - RNA, 1014 nt, synthetic construct
  source 1..1014: mol_type = other RNA
atgtataaaccacaggacattagctctcctctgctcttctcaggctttctgcggtgtgcagaaaaagccatccctattctcaagtccaaaagcgagggggtgttagagatgaatatcccaaaacataatcccaagtatggctacagaaaggtatacaaggctacaagtcaattgctgtcttatactttgaagcagctgcactttgaacttagcaacctgtataagccacaatcttgcattggagggtttaccaggggcaggggcattctgtataacgccagtccacacataaacaagaaagtggtactgaatatcgacatcaaagattttttcgagtccattccttttgagctcatagtgtcgaccttcgttagatatggatttacgagtgaatttgccaatgatcttgcggagatcgtgacctataataaggtgctggtggccggcttcaatacaagccccatagtcgcgaacatgtgctgtgaggacatggatgcaaagctcttggctctttgttcagcccatcagatctcctacactcgctatgcagatgatttatctttctccggggaaagcatagagtgcgtcgaggacattaaagccatcatcgttcagtacggtttcattattaacgacaagaagacccggatttacagaaaggggggtcctcagtacgtcacagggctgactgttgtggatgaaaaatgtccccggataccccgccgcattaaacgagagttaagaagtgacatctactacatcgtgaaatacggactggaatcccacattaggtataaataccaccttgacatccatatcttcgataggtattacatgggtgacctctgcctcaacgaggctcggaaaatcgtcggatggatccatttcattaattcagtcgagccgatggtggctaagcgtctgaacgaaatgctgttcaacaagcgacacgaggatctaggctactttatcaatgcctatggatacatagaaaacttgacagacctaaagtga

SEQ ID NO: 14319 - RNA, 1092 nt, synthetic construct
  source 1..1092: mol_type = other RNA
atgtattcaccctcagcaatagagaacttcgaaatgttatcttcctatctgaggacaacacccgaccagctctctaaactggcccacgggcaaagactgatctttgactttaagtcggaaagtctgctagtgaacccaccagagataattatcagagaaaacgttaccgtgtttcggaagttttacatccccaagaaaaataagaagttgggctatagggtcgtgtataaagctcacaaacagttcgtgaaagacatccataagactctgaaattcaatctcaccaatatttacacccctcacacgtgtgtgcatggctttataccgggcaaaaatatccgcagtaatgcactcgtgcatcttgagaagaaacacttgcttagtctggatatcaagaactttttcgaaagcatcgataaaaagtccgtgtccgccgcgttcattagccttggcttcaacaaatctatcgcatctgacctgtctgtcatctgtacgttagaggataaactggtccagggtttccccacaagccctatcattgctaacatcgtttgcaccaaaatggacgaggaaattcagaatctgtgctgggtgtacggggccacttatagccggtatgcggatgacttgtccataagctccaattttgatatgccacctgtagaggaaatcgagcttattctgaaaagctttaacttcgagctgaacgctattaagactaagcgctttctgcgggggcagaatcagtacgttaccggactgtccatctctgactcagcctaccctaggatccccaaggccattaagaagcgcatcagacaacagctgtattacatacgaaaatacggataccactcacacatttgcaagataaagggactcgataaggagactgatctcagcataacaaagcagtacgtacgagagattgaaaacaagttgaagggttggatttcatacatccattccattgagccgttactagccgagaaatacttcgacattttcaacgaaattcagagtatcgagtatgctgaagtcatcaaactcctcaagagggacccacaaatcagacgtttcaagagcaaatga

SEQ ID NO: 14320 - RNA, 1068 nt, synthetic construct
  source 1..1068: mol_type = other RNA
atgtatcagcctaaggagatcgccaacttagatctgctgagcggttatcttagaacgcacaagcacgacctaaataatttcgtgagtggcgtccgggccgtctaccagcagaagtcaggcaagatctgcgtgtacaaccacattaagtcatggaaggatattgacgtgcaatatgataagtaccacatcccgaaaaagaatcctaagttgggatacagaatcgtgtatgagattcgaacactctccgcactcaatatcttaaaggtactcaagttcaatctctcgactctttacaaaccacatgtttccgtgcatggattcgtgctgggccgtggagtattctctaatgcgaaacaacatttagctaactactatctgctgagaaccgacatcaaaaacttcttcgagtctatcaacattgatatggtgtacgaagtcttcatagacctggggtttataccagaaatagccgaggtgctgagtaaaattaccacactcgacaaccacctggttcagggtttgcctacttctcccattatagcaaaccttgttctgaagaacatggacacagaactgaaaagcctgtgtaaaaagtacaatgctgtctataccaggtatgctgatgatatctccatcagctcaaattccgacttgccccccctgaaagagatcgagaacattgtcaataagtccaagttcaaattgaacaccaagaaaacaaagacctttaaacgcggccaaaatcagtttgtgactgggctaagcatttgtgataatctctatcctcgcatcccaaagaaaataaagaggaagattcggcaggagctctactacatcaaaaagtttgggtatgaatctcacatctgcaagaagtttgactttgacgaggaaaattacaacgaagatttcgtaagtgaagagaaacggaagcttgagtataggattaaagggtgggtggattacattcatagcatcgagcccaaagttgccgagaacttttataacgatctgaaagtgattcaggacaacgaaatcaaaaagatggacgaatacggcgacgcattttga

SEQ ID NO: 14321 - RNA, 1740 nt, synthetic construct
  source 1..1740: mol_type = other RNA
atgaatttgaatcagctcaacagtctcgatatcatcagcaaaagctttaacataccgctaaagttcctgcagagtattagtaagaacgagaagaacatcaagtacattgagttattcgacatcccaaagaaaaatcccaaaaggaccaagaaataccgagaggtaatcaagatcaattctccttacaatctcttctacaaagagctcctgcacatcatcgaacaagaaattgaacagaataaggccttcttcatttcgaacattgctcacggatttataaaagagcggggtgttttgaccaatgcaaaacaacatctgaacaagaaatacctgttcaagatagacatcaagaattacttcaagtccataacgaaggcaagtattaagtctgtctttctaaagctcagattttcagagaatggagccgagatctttagcgatctgtgtacattcgaagacgtgctctacgaaggcttcaatacgtctcccatcttagcgaatttatattgcctgaatctggacctggagttaaaatccctggctgatgaatataaggtaggcataagccggtattcagacgacattactttttcctccaacaacaacaactttccacccctgaaggccatccaagacatattcgacaagtacaactttaagatcaacgaggagaaaacaataagcttcaaatatggacaaccccagtatgttacaggactgagcatttcaaataacaagtatcctagggtcccaaagcgtatgaaaagaaagataagacaggaactctactacctaaataagtacccagagaattacttcaacatcgaagatggctatgcccgcctccgggctatttatggtaaaattgtgtacatcatcgggatagaaaagattctcggaaagcgttaccagagtgattttatcaacatccttgagaacaacaacatctatctcgagaatctgtacatggacgcaccccagaaaaaatctgggatgtgtacttatcattacattgacgaatctgagactccggataagaaaactctgattcttagtttggtgagcatcaatgggaactttctgaagaataccattttcaacaagctgaccttattgcagaatgacttggtttctgatctgcgcaacgggcttaccgataatcaaaaaagcaagcttttccactactgcgaggataatattaccgtgaaagagcggtatatctccattttgagagagctcaatatcgaagcccagattatgttcaaatcggaacaggaaagcatggacaaactgggtaaagaggtgtatcagaacaactattatgccctgtttaactccctgatgaaaaacattctccgaaggtacaagaataataccaacatgatcacagtcgaggaaaattcaaagatcagcctcgaaaaactgaaagaaatcgtgttgtccaaagggtcatttttccctaacactattatcgagaagtccggcaaagatgacatacttctgtcaattcctgattacattcttggcatcgtgagggactgtatggagaacaatttttccgagaagcttaacaagctaaaaacaggccagacgctgaaagagaacataaagcttaacgagatctctgataagattcgcctgattgctgacctgacaaacaatcagttctttactcagcagaataacaataagatggattgcctgaaattgaacgactatatccacaataagaccgaatga

SEQ ID NO: 14322 - RNA, 1749 nt, synthetic construct
  source 1..1749: mol_type = other RNA
atgaacctctactacctaaatagcctcgacattatttccaagtcatttaacacaccacttgagtttctcaattccatctttaactccgaagtgaacagcacatacattgagctgtttaacatccccaaaaaaaaccccaagcattccaagaaatatcgggaagttatcaacatcaagtctagctacaatctcttctataaggaactcctgtgtgtgatcgaacaaatcatcggtcagaacgagaaaaactttgtcagtgatattgcccacgggttcatcaaaaaccgtggcgtgtttaccaatgcgaaacaacatctaaataagaagtacctgttcaagatcgacataaaagactttttcaagagcattccccaagatgggatatccaacactttccttaaactgggctgttcacaggatggcgccaacctgctgagcacgttatcaactttcaatggcattctctacgagggatttaatacttcccccatcttagcaaacctgtattgctacaatttggacctggaactcattaaacttgccgatagttatgacgtcattgtgacacggtattcagatgacattacattctccagtgacacaaattcttttccttcgattgatgaaatcgagaaaatcctgaaacagtacttcttcaacataaaccatgagaaaaccctctacctcaaatatggtcagccacaatatgtaacggggctgtccatctctaatgataagtaccccagggtcccaaagcgtctgaagaagaaaataaggcagaatctgtattacatgaacaaatatccagagaactacttctataaggaagacaattatgctgtgctgagagctatctacggtcatatcgtatatctgctcggaattgaaaaatcgttagggaagaagtatcagagcgagttcatcaatatcatcgaaaactacctcaacctggaagacatctatatcaactctcctcagaagaagagcaccttgagtacttaccactatattgacgaatcagagttcatagattctaaaaccaacaagtactaccttattcttagtctgatttccataaacggcgagtttcaaaagaacatgatcagcgacaagattaatgctctgaagaatgatctggcctctgattttagaaatgggttgaacgacgaacagcgctcaaagctgtttcactactgtgaggataacatcagcgtgaaggaaaagtacattagcatcctgcgcgaattgaacattgaggcacacatcattttcaagtacgaagataaaccgatgaaaaagcaggactatcaggataattattacgccctcttcaatagtctcatgaagaatatactacggaggtacaagaacaatacaaatgtcatagtggttgaggagaatagtaaaatctccattaacaccttggagaaatcgatactgaatagacgattcttctttcctaatatcgagattgccaaagcttctaaagacgacgttcttctgtccatccctgattacatcctgggaattgtgagagactgcctgaaaaaggacttcttggagactttagagaaattaaaggcgggccagcgcctaaaggaggatataaagtttgacgagatcagcaacaagatacggctgatcgcaaaccttaacaactctaatttctttaccaggcagaataatagccagcttacctgcatcaagttgaatcagtatattcaccacaaacgaattttgggatcttga

SEQ ID NO: 14323 - RNA, 1719 nt, synthetic construct
  source 1..1719: mol_type = other RNA
atggatatcaggaaactgaattcgctggaggctattgctaagtcttttaataccgacattggatttctggaattcatgaaagagcctgaaaataccaagacgcagagcgactactttaaactacttaagctgaagaagaagaacaaaaagttctcaactagtttccgggaagtgcttaagatcaacgagcctttcaatgtgttttacaaggaactgctcaatgaactggagaagatcatctactcagactacaacaagtatatttctgaatacgctcatggatttcttcgcggcaaaaatatagtttcgaacagcaaagagcatcttaacaagtactatctctgtaaattcgacatcgaggattttttcgtgtccattaagaaggagagtatagagaaggtcttcataaaaattggctgcgagaaacaagccgccgaactatttagtaatctgtgcacttacgataatgctctcaaagaaggtttaaatacctcaccactgctggccaacttgttttgtcataaactcgatgctgatatccggagtagtatcgccaaaaacatcgtgtatacacggtatggcgatgacataaccttctcttctgacaaaaacaatttcatcaagacagacgatctgcaaaagatactgaataagtacaacctgaaactcaataagcaaaaaacactgtttgcaaaacagggacagccacagtatgttaccggtttaagcattagcaacagagagtatccgcgcgtccccaagaaattaaagcgaaaggtgcgacaaaaactctactacatgaacaagttctttgaaagcaattccgaagaggagctgctgaagagactctatggggagattgcctatattatagggatcgaaaaggacttgggcgagaaatacaaaaaaacgttccttgagatccttaaaaacaacaactgtacaattgacaacgcatctgcgaaaacttttaaggtcacaacggcaaaaaggattttccactacatagatgagtcagagatcatcattagcactgatgctgataagcagtatttagccatttgcgtggtgtccattatctccgactccgataaacagaaaaatattcagaagttgggggagctgaaaaacagctttttgatcgacgcaagggacgaatttataaaaaaagagggcctctttcactacactagtgataatcccgaagttaagatcaaggtccaggatctgcttagagaactagaatatgaggcgtttatcatcttcggcaaattcaataagaagattaccaaggaggaatatcaggagttgtattatgggctattctcaaagattttcaacaatatcctgctcaatagattcggtgatgccaataattacatttgctacgaagaaaactccaagatctctactaataagctgagctcctatttgtgcaacaaaaagcactctaccaagttcaagattgagaagatatccaaaaaggacattttgtccaccctgcccgactatgtactgggaacattttgtagcttagcaaaggaggagaagctccttgagaagatcgaaaatcagaagtacccttttgccctccgtaacctgaacaaaatcagctcaaagatccgcctgatcgtagacaacaacaacaaaatctactactctaggcagaacaaaaataaaaacgacttcctcgagattaacaagaacatcatgaattga

SEQ ID NO: 14324 - RNA, 912 nt, synthetic construct
  source 1..912: mol_type = other RNA
atggaatccctcaatttcaataagattcgcaacattgacgatctggccctgtactttcaatgtacaattgacacgctgaagaacatcatagagaacaaagagaactatagctctagaagacaaattccaaagaaaaatggcggaaagagaaggattatcatcatcaacaactttgattggtcacggtttttgaaacagattcacttttccatcgagaaacagtatccttacctcgactgtattgaaggattcttaaagagtaagagcatcaagactaatgcttctaagcacatcaataaccagtatttgttaactctcgacataaaggacttctacttttccattaagtacgaggatattatcaactcattcaaggcacttggggctaatgataccgtgtcagagatacttggtcaaatctgcacctacaataatctgctctaccccggctttaacacctcccccctaatctcaaacatcgccttcgagagtttggaccgcaaaatctgcgacctctgcaaagagaaagggataaactattctcgatacgccgatgatctgtccttcagcagcaccaatccaattgagatcttgccgataattaaacagtatctgtctgagaaagcgtttgaaatcaacgaatacaaactgcggttctctaagcatggccaggcacagtatgtcactggtctaagcattagcgataagacaatgccacgtcttcctaggaaatttaagcggaatatcaggctcctgctgcactacgctaaaatgaatgggattgaaaactaccacaaacatcccaagagtcgacacctgctgacaatatacggacagatcatgtatagttattcgattgaacctcatttcgccttcaaatgtcttaagatcttcaatgacatcaagaagtga

SEQ ID NO: 14325 - RNA, 909 nt, synthetic construct
  source 1..909: mol_type = other RNA
atgcttcttctggactttcccaatatccgccacaaaggtgacttgataaagtacttccagacaaacacggaaacattcgattcagtcctggtttccaaaaataaatttgcccacgtgattaacatccccaagaagaagggaggcaatagagaggttatcaagctcaccaacgaagattggaagaggtttttgaaacagattaacttcagcctgcaccagctatacacctttcctaactgcgtccagggcttcattccaggacgaggtataaaatctaactcttacttccacctcaagaatcggcagctccttgtgtgtgacatcaaggacttttactatagcattaaggaatccgacataagcaacatctttaagtacttcaaggcttcagatgaaatcgcaaacttactcgccaaactttgcacgttcgagggcattttattccccgggttgaatacctcccctactctggcgaatctgtattgtgagaagatggacgagaaactgagcatactaatgactagccatcaaggggtctacacaaggtatgccgatgatcttactttttcgagtaaccagaccctccccaacctgaaagacatctctgagctcctggaaaattataactttaagttgcaggagcgtaagacccgatatagttccccaggccaacggcaatatgtgacagggctgtcaatcagtgataagagggtgccaagactgccgaggaatttcaaaagaaacatcagactgctagtacatctcgcagaaaaattgggcgtgaaagagtaccacgagaatttaaattctcgcaacctgttcactctcaagggacagctggtatttgctatgcatattgagcctattttcgccaaaaagtacctggtgcgcctgaatcggctgatctga

SEQ ID NO: 14326 - RNA, 939 nt, synthetic construct
  source 1..939: mol_type = other RNA
atgatcaagttagatttctctaagttccaagacgagacaacgatctctactaacttccacatcctaaaaaagaatctggacgatctcctgaccggcaaccaggaggacttttacgaagtgttacatatcccaaaggctaataaaagtctgggataccggaaggtgtataaacccaattggaagattgacggcttgcacaaatacattctggagcagatcaattttaagagcaaacctcttattcacgattgtgctcatgggttcataaaggggaaatctatcctcacaaacgcacagcagcacctcaataaaaaatacctgctgcaggtcgacattaagagcttctttagctcaatctcccaggatgaggttaagcgggtgtttattaagctgggctgcaacgattatgtagcggagctgttcagtatcctttgtaccatcaataacagcctggccgaaggactgaatacatcgccgactattgctaacatctacttcttcgaactcgacgaaattctgaatgaaatctcccgacgctatagttgcacctacacaagatatgccgacgaccttacttttagctcaaacaactatttcgactatacggagttgctcaaagagatcgaggatgccctggaaaagaagaatctgacccttaacaacaagaaaactaggttctccaagtatggtcaggcacaatatgtgaccggcttgtcaatatccaatgaggtcagacctcgcatacccaagaaaataaagaaaagactacggcaagagttttactttattaagaagtacggcttcaacgcacacttttctaggtgcaaccagaacattaaaaatgggcataataggctgaacggatggttactctacgccctcaatgttgaaccagattattttcgtaagctttacgccgaatacaaaggtttgaaatga

SEQ ID NO: 14327 - RNA, 1668 nt, synthetic construct
  source 1..1668: mol_type = other RNA
atgaaccaggtcgtggatttctcgggcctgagcaacttgcggtccatagcctcaacctttaataccaagctggagtttctcgaatccatcctgaagtcccccacccgctctgagttctaccaaaaaatgttcatcctaaagaagaacggaaagggctaccgattagtgtacaaagccatcaataaatcactgtctctctttcacaaaaaccttagcacaagtctccagaagctggaaaaagagtttgtacatgattgcgcatatgggtttgtgaaagggaaatcaacatttgacaatgccaagattcatctgaatcggcaaatattggttcagttcgacattgaaaactttttcaagtccatcaactacgagaatatcaagaagattttcttccaactgtgcaagaacgatgatatcgcttccatcctgacatctctgactacagtaaatactagcttggttgagggacttcacaccagcccagtgctggcaaaccttttcttctatgacctggacatacaattattcgaacttgcgcagaaacacgactgcctctatacccgttatgccgacgacatcacattctccactaacttcaaggatatcaacgttaagaagttagaaaaggaagtgtcggccatcctcaaagagtccaatctgagtctgaataacgagaaaactcgcatctctaagaaagggcagcctcagtacgtgacgggcctcagcgtcagtaaccctgaatttccccgaatcccgagactgatgaagaagaaaattcggcaggaactctactatattaagaagtatggtgcagaggatcatttcatgaacaagaaggagaaactgtatgatggcatgcagaggctgaacggatggatcatttattgtcatgcgattgagaaagagctcgctaagaagtttcaagatcagatattgatgacggacgcttatactgacattcatgagtacaataagagactaaggaagaaagagaaaagaaaagaagagctgcacctgtactttgatgaaactctctacgaaaattacttcggcatgtcatgcgtgttgatccaggacgagaatcaccaggatattagcaatgaccttaacaccttttacgaccaattgtcaggtgatcagctgataccaaagaaaggtaggattttccattactgtgaggacagtcacgatgtcaggggacaaattgtggaccgcctgaggaagtgtgattttcaggcctacatcgtgttttctaaactggaaaccaatagctacacaaaagatgactacctgaagatcttctataaggtcttattcgatcggatccacaaaaattatgattgcactgtgcacatttactacgaggagaataacaagatcaaaaccgctgatattgatgacctagtcgaagacatcaaagataagcttaataaccagacaagtatggtgatatctataaacatccagaagattaccaagcagaatcatctcagcgtgattcccgactatgttcttgggttgtttaaagacgcctacctcaaaaaagagagaaaggactttgaaattcgctattgtcagaaactatccaacaagataagactcgtaatcgacctggacacgaataaatattattcacgtcaccagacccttagcttatctaacgagtga

SEQ ID NO: 14328 - RNA, 984 nt, synthetic construct
  source 1..984: mol_type = other RNA
atgttgattaagttctctgagatcgagaacctgactatgctcagccaatttctgtacatcaaagaagacaacctactgacactgttgaaggaaggcgctgttagcagctgttgcgaaaagatggccatacctaagaaaaaccgggccttagggtatcgggtagtgtataaagttaactctcacctcctgaaaaatgtgcataaggtcctgtgcggtcatcttaatgccgtctatgatgcccctgcgtttgtgcacgggtttgtgcttggcggatgtacaagaagaaatgctgcacagcatctgaataaaaaaaagatcctgggcttagacatcgatagattcttcgacagtattagtgagaacgcgattaaggaagtgttttgcggcctggggtgtaggatgaatatcgcagccaatctgtcaaagctaacaaccatcaatggtcgacttccacagggtttcaatacgagccccgtattggctaacataatgtttggacacctagatgcccaactgaactctatttgtaacgactatgggtgcatatatacacgctacgctgacgacattactatttccaccgatgaccagcttcctccagtcgctcgcatcaacgacgtgcttttcactggcggcttccgcttaaattcatccaaggaaagggtaatgtttagaggcaaaaaacagtacgtgaccggactgaccgtgttcgatccagagtatcccagggttccgaagcgttttaagcggcggattcgactccagttgtactatctggtgaaattcggagcaaagtcctacgtgatgcgtgaactcggtctgtccgaggaagatgtccgcaacgattatgagaaactgcaactcgtctcgggaaggaaggtgcagctccagtaccagatcaaagggtggatagactacgttaattctatcgagcccctcttgtcagagaagtactacgagagttacaacgcaatcgcctggtga

SEQ ID NO: 14329 - RNA, 972 nt, synthetic construct
  source 1..972: mol_type = other RNA
atgagtttctccgtggatcaactagctgagcaagtgggaacttccgtggagaacctcgaatttctgagcgagcatctgccagcaggggaaggactgctgtacgtgcagcggcggcacaggaaaaagcatggaggcatacgtgaagtgttcgagcccaaacccccttttaatgccgtctccaaaaaccttcacagaagctttaccagccagtttagttacgaggccccagaccacgtgcacggatttgtccgcggtcgatccaccatttctaacgcgagtcagcatctggctaagaagtgcgttttgagaatggaccttgaagacttctttcctagtatcggcgcagcaacgattagggctagcctaagagagcagggcttcgacgagaaagccgccgaactggctgttagcctcgtaaccatcggcggcaagctgccgattgggctctctactagccccttgctcagcaacctggcctttttggatacggatcgatcactggccgcctatgccaggtcagagggcttatcattcacacggtatgtggacgacctcacattctctggggacgttactgataggcactcgaccgacatcgcacgaattctggacgatgctggatggtctgtcaatactcggaagacagccttcatgaggagaggggggccacagtatgttaccggcctttacgtcggcgagtcagatgggccccatatccctcgcgcgttaaagagaaaaatgcggtggatcctgcatgtcatatccaagttcggatacgaagcgtacatgacagattttggtggtgagaatgaaggcatgtatcgctgtaggcttctgggttgggcatgctatatcgctgccgtggaacgtgacgtggggttctccctccttcgcgagttcgatcgcttagtacctgagggatctgatgaggaattgcacggctacgacgaagacctgtacgatctcctgtga

SEQ ID NO: 14330 - RNA, 963 nt, synthetic construct
  source 1..963: mol_type = other RNA
atggcattctccgtcgaccacctcgccgaacaggctttcctttcagtgaaagatctcgagtggcttagcgctcatcttccggctggggaaggcactttttacgttcagaggcgccaccgcaagaaacatggaggtattagagaagtctttgaactgaaaccacctttcgacaccgtctccaagaatttgcacagaagcttcacctcgcgtttctcttacgaggcaccagcacatgtacatgggtttgttcgcgggcggtctaccatctcaaacgccagtcagcacctagccaagaggtgcgtgttacgtatggatctggaggacttcttcccaagcataggggccgcggcaatccacgatttgctcagggagcagggatatgaggagaaagccgcagaactggccgttaatctggtgactattggcggaaagctacccattgggctgtcaacatctccactgttatcaaacctcgcttttctgtccacggatcggagcttagccgagtatgcccgctccgaaggactcagctttacacgctacgtggatgacctgacttttagtggcgacgtcaccgataggcatagcatggacatcgctaggattctggatgacgcggggtggtccgtgaacacacggaaaacagtgttcatgcggagaggcggcccccaatatgtgaccggactgtacgtgggcgagagtagtggtccccgaatcccccgaaaggtgaaaagaaagatgaggtggatactccacgtaatctctaagtttggatacgctgcctacatgacggactttggcggtgaaggcgatgagatgttccgaagacggctgcttggttgggcgtgttatattgcagccgtcgagcctgacgtgggataccctttgctgagagctttcgacgaattggttgatgaagaagatctggagggggacgaggagggcctctatgacctgccttga

SEQ ID NO: 14331 - RNA, 924 nt, synthetic construct
  source 1..924: mol_type = other RNA
atgccatatagcgtacacgatctggcacagcaggcaggcgtgagcgtggaagtgctcgagagactgtcgtccatgttaccggcaggagccggccaactctatgtccagcggatctaccgtaaaaagcacggcggaattagggaaattttcaagcctaagcccccttttgatgccatcggcaaaaatttgcatcgaagtttcacctccctgttctcatacgaggctccagatcacgtgcacggttttgttagggggcggtctactatatcaaacgcaagccagcatctggctaaagggtgcgtcctacgcatggatctggaggacttcttcccatctatcgacgccgctaccatcaaggcttctttacaggagagaggatatgaagagaaggccgctgactttgccgtgaacctcgtaacaatcgggggaaaactcccaattgggttgagcacatcccccctgctgagcaatctgatctttctgagtaccgaccggagcctagctgaatacgcgcagagtgagggactttccttcacacgctacgtggatgaccttgcgttcagtggagacgtgaccgatcgccactctgcagacattgcccgcatacttgatgacgccggctggtcagtgaacacacggaaaaccgcatttatgagaaggggcgggccccaatatgttactggactttacgtcggtgagtccgatggtccgcggattccccgaaaggtcaaaagaaagatgcgttggattctgcatgccatctcaaagttcggttacgaaacgtatatgactgagtttgggggcgaggacgagggcatgagaaggaggcgcttgctcggctgggcttgctacatagccgaagtggaacccgacgtcggctatcctctgttgcgaggttgtgttgggtggccttgggccgggtga

SEQ ID NO: 14332 - RNA, 1011 nt, synthetic construct
  source 1..1011: mol_type = other RNA
atgatcgcgctgacctgggaatgtgatcctatatccaggaggcctgcagcagaagggccagtggagttcagcgtcaataacctcgcggagcaagcgggcgtctctgttcggaacctggagtggctgtgctccaatctgcccacaggagccggaaggctgtacgtaagaagaacgaaccgcaagaagcatggtggtgtccgcgaggtgtttgagcctcagtttccattcgatgtcgtgtccaaaaatttaaaccggagttttacttcactcttctcatacgaagccccttctcacgtgcacggcttcgtgagagaacggtctacaattagtaatgctagccagcaccttgccaaaaaatgtgttctccggatggacctcgaggatttctttcctagcattgacgcagccacacttaaagcctccctcagggggcagggctacgaagagaaggctgccgagttcgctgtgaagcttgtgaccataggcggtaaactcccagtgggactgagtacttcccccttattgagtaacctagtgttcttggggaccgacagaagccttgctgaatacgcccagtcagaaagcctgtcgtttacgagatatgtggatgatctgattttctctggcgacgttaccgaccgccattccgccgatatcgctcgaatcctggacgacgctggatggagcgtcaatacccggaagacagtatttatgaggcgaggcgggccgcagtatgtgactggactgtatgtcggcgagtcagacgggccgcgtatacccagaaaggttaaacggaagatgcgctggattttacacgttatctctgaatttgggtacgacgtgtatatggaagaattcggcggagaggatgagggaatgcatcgtcgccgactcctggggtgggcatgctacatcgctgccgtcgagcccggtgtaggctttccactgttgcaagcattcgatgaactggtgcccgagagggccgaggaggatctatatgacttgccatga

SEQ ID NO: 14333 - RNA, 939 nt, synthetic construct
  source 1..939: mol_type = other RNA
atggtggatgatctggccgagcaggccggcgtgtctgttgagatcctagaagccctctctagcgcactccccgctggtgcagggaggttgtacgaccagcgaatatacagaaaaaaacatggagggatccgagaggttttcaatcctcggcagccactggctacaatatccaaaaaccttcaccggtctttccttcatctatttagttatgatccaccaaaccacgtccacggtttcgtgaggggccgctcaactgtcagcaatgccgggcaacacctggcaaagccctgcgttttgagaatggacttagaagacttcttcccgagtattggcgcggctaccatcaaggcgacccttggcgaacagggatacgaagagaaggccgcagatattgcagtaaatctggtaaccatcggaggaaaactgccgattggcttaagcacttcccctttgctgtcaaacctggcatttctgtccaccgacaggtctttagccgagtatgcccagagtgaaggtctgagctttacgcggtacgtggacgatctcacattttcgggggatgtgacggaccggcatagcgtggacattgcgcagatcctcgacgatgctggctggtccgtgaacactcgtaagacagccttcatgcgcagaggagggccccaatatgtcaccgggctgtatgtaggagagtcaggcggccctcgtatacccaggcaggtgaagcgcaaaatgagatggattctccacgttatttccaagtttggctactacacatacatgtcagagttcggaggcgctaatgaagtcatgctgcgccggagattgctcgggtgggcttgttacatcgccgctgtggagcctgatgtgggttatcccctcctgagggcctttgacgagctggtcccagaacctgatgaggacatctatgacctgctttga

SEQ ID NO: 14334 - RNA, 960 nt, synthetic construct
  source 1..960: mol_type = other RNA
atgccttactccatcgacaatttagcagaacaggctggagtatcggttgaactgctagagcatctcagtagctcccttcctgccggggctggacgtctgtatgtgcaaagggttcatagaaaaaggcacggcggagtgcgcgaaatcttcaagccgcgaatggactttcagttcgtaaacaagaacctccatcggagcttcatcggcctgcttccgtacgaagctccagatcacgtccacgggtttgttcgagaacgctctgccgtctcaaatgctaggcagcacctcgccaaagcatgtgtgttaagaatggatctggaggacttctttccaagcattcgggctgagacagtcaaggtaagcctgatggagcaaggctacgaagacaaagccgctggagtggccgtcaacttagtgacaatcgggggcaagctgcccatcggcttgtctacttcccccttcctcagtaatctggcgtttctcgacactgaccggtccctggcagagtacgctaagtcagaggggttgtcttttacccgctatgtggatgatctggcattttctggtgatgtcacagatcggcatgccgttgacgtggcccggatactagatgacgccggctggagtgtcaacacgcggaaaactgcgtttatgagaaggggtgggccccagtacgtcaccggtctgtatgtgggtgagagcgatggaccccgaattccaagaagagtgaaacgtaagatgcgctgggtgctgcacgtgatttccaagttcggatatgatgcatatatgatggagttcggcggctcaggggagggaatgacaaggcgcagactcatgggctgggcctgctacattgcggccgtggaacctgaggtggggttccctctgctgagggagttggatgcacttgttccagacgaggacgaagaggaccttgactacttggaaataaccacctga

SEQ ID NO: 14335 - RNA, 951 nt, synthetic construct
  source 1..951: mol_type = other RNA
atgccatatagtgtcgaagatctggcacagcaggccgacgtttctacagagatcctggagtggttgtcctcagaaattccgacagggtttggcagactttacgagcaacgtatataccgaaagcggcacggaggtgtgagggaggtcttcaagcccaaacgccccttcgataccgtgtctaaaaatctatatcggagtttcacgaggctgttttcttatacggcccccgaccatgttcacgggtttgtgcgcgagcgatccactattactaacgcgtcccaacatttggcaaaaaagtgtgttctgaggatggacttagaggatttcttcccttctatcggagccgctactgttcagacaattctgagagaacagggttacgagggcaaagtagccgatctcaccacctcactcgtgaccattgggggcaagctccctatcggcctgtcaaccagcccactcatgagcaacctagccttcctgacaactgatcatagcctggccgaatacgcgcagtccgaaggcttgagcttcacacggtatgtcgacgacctcactttttcgggtgacgtgacagaccgccacgctacagatatagctcgtatcctggatgaagccggatggagtgtgaatacgagaaaaaccgtgtttatgcggcggggaggtccacagtacgtaaccgggctttatgtgggcgaatccgacggaccaagaatccctcggaagctcaagaggaagatgaggtggatccttcacgtgatctcaaccttcggatacgatacttatatggcagagttcggcggccgcgaagaggggatgcgaagaagaaggttgcttggctgggcttgctacattgccgcagtcgaacccgacgtcgggtttcctttactgcgcaaatttgacgagctggtgagcgagggggatgctgaatactgggacgaggagtattga

SEQ ID NO: 14336 - RNA, 963 nt, synthetic construct
  source 1..963: mol_type = other RNA
atgccttacagcgtagatgacctggccgagcaggcgggagtatcagtggagatgcttgaaaggctttccagtactctccccgcgggtgcaggtcgactgtacttccagagaagatttcggaagaaacatggcggtgttcgcgaggtttttaaacctatgagtccctttgatgccgtcagcaagaacctccacaggtcattcacagggttattttcttacaaggcacccgaccacgtgcatggctttgtgcggggcagaagtgtcatctccaatgccagccagcacctggctaaagggtgcgtgttgcggatggacctggaagacttctttccatccattggcgccgcggcagtgaagtcggccttatgcgaggaggggtatgaggagaaggccgctgacctggctgtcaacctggtcaccattggaggcaagctgcctatcggactctccacttcaccattgcttagcaatttagctttcctggccacagatagatctctggccgagtacgctaggtccgaggggctctcattcactcgctatgtggacgacctcacgttcagcggtgacgatgttaccgatcaccatgcagttaatatagcccggatccttgatgatgctgggtggtctgtgaatacaagaaaaaccgctttcatgaggagagggggtccacagtatgtgaccggcttgtatgttggcgaaagcgacggccctcggattccgcgaaacctgaaacgcaagatgaggtggatcctgcacgtagtctctaactttggctatgatgtgtacatggcagaattcggagggcgtcgagaaggaatgcgtcgccgcaggcttctaggatgggcctgttacatagctgccgtggagccggacgtcggatacccattgctgcgggcattcgacgaactggtgcccgaggatgaagaggaggaagaagaagggctatatggcctccaatga

SEQ ID NO: 14337 - RNA, 954 nt, synthetic construct
  source 1..954: mol_type = other RNA
atgcctttttccgtagacgacctggcagagcatgctggcgtctctgccgaggccttacagaaactatcctccagcctgccaactggtgctggacgcctttatttccagagaacgttccggaaaaagcatggaggcatcagggaggtgatcaaaccggcatcaccatttgatgcgatctccaagaatctcaataggtcattcaccaccctgcttccttacaaggcccccgagcacgtgcacggattcgttcgcggccggagtgtcgtatctaatgctagtcagcacctggccaaagagtgtgtgctccggatggaccttgaagacttcttcccaagtattagcgcgaccacagtcaaggcactgctccaggaccaaggctacgaggaaaaggcagccgatattgctgtgagcttagtgaccatcggaggccggttgcctataggcctgtcgactagtccctttctatctaaccttgcattcttaagcacagatcgatccttgagcgactacgctagaagcgaggacctcagctttacgcgctatgtggatgatctgactttttcgggtgagataaccgatagacattctgaaaacattggaagaatcctcgatgacactgggtggtccgtcaacacacgtaaaaccgccttcatgaggaggggggggccgcaatatgttactggtctgtacgtcggcgaatcaggacggccacgtataccccgaaaaatcaagcgaagaatgcgctggattctgcacatgatctcaaagtttggctacgatacatacatgtctgactttggtggggaaaacgaagaaatgtatcgcaataggctgatggggtgggcctgctacattgccgcggttgagcccgacctgggctatcctctcctgagggccttcgacgagttggtgcccgaagggtattacgagacagctgtgtgggatttgggatga

SEQ ID NO: 14338 - RNA, 993 nt, synthetic construct
  source 1..993: mol_type = other RNA
atgcctttcagtgtggaagatttggctcagcatgctggggtatccgcggaggtcttagaagtcctctcctcagcactacctctcggcgaaggaccactttaccgggcctggacatccagaaagaagcacggtggcatacgcgaggtcttcaaacccctgtcacccttcgacgcaataacaaaaaacctacataggtctttcacggatctgttaccttacaaggctcctgaccacgtacacggctttgtgaggggccgtagtactattaccaacgccagccagcatttagggaaggcatgcgtgctgcgagtagatctggaggacttctatcccagcatccgagccgcaatggtcaaggcctcacttcaagctcagggctacggtgagaaagccgccgatgtggcggtgggaatcgtgacaattgcaggcaagctgccagtggggatctctacctctccctttctcagcaacctggttttttgggacacggaccggtccttggcagaatacgcccagcgggagggactcagctttacacggtacgtggacgacttgaccttctctggcatggtcgtggatcgccaccttgcagagatcactagaattctggacgatgctgggtggtcggtgaacacccggaagactgcctttatgaggagaggtggcccccagtatgtgaccggattgtacgtcggcgaagctgacggacctaggatcccgcgcaaagccaaacgtagaatgcgctggatcctgcacaagattagcaaatttggctacgagacttatatggaagattttggtggagaggaccaagttatgtatcgaaataggctgcttgggtgggcttgttatattgctgccgttgagccagatctggggttcgacctgctcagaaagttcgatgatctgattccggaaggttattacagtaatggatatgccgacatggcggggctcctgcatgttataaatgatatcgacgatctcccatga

SEQ ID NO: 14339 - RNA, 1029 nt, synthetic construct
  source 1..1029: mol_type = other RNA
atgactctcgtgttgaccgccgacattctcatcggtgccatagggtacccaacgagggtgctggaagaactcgcactgatgttgagaggcggcggactgcaggtctttagcctgcaaagtcaccggaagagacgtgggggtgtgagggagatcgttaagccccggccacttctggattctgtgtcgaaaaacctttacagaagcctcctagagctgctgccctacaggcccccagaccatgtgcatggcttcgtccgcggcagaagcaccctaaccaatgcccgcgcccacctcggcaaaccatgcgttctgagagttgatcttgaggacttttttccttcaattagttctacaaccctgcagggagctctggaccagcagggctgtgatgagaaggcggccgaattagtggtatccctcgccacggttttccagcggctgcctatcggtctgtctacatcacctttcctgtctaacgtcgtctttctgagcacagattatgctttatccgaatacgcccgcgctaacaatttgtccttcacacggtatgtcgacgacctcgcattttccggagacgtgaatgaccagcacttcgaagctatcagtgagattctgaacaacagtgggtggtcaatcaatgtcgataaaaccgcttttatgaggcggggcggtaggcagtacgtgactgggttgtatgtgggaatggcggatcgtcccagagtaccgagatctttacgacgcgagatgcggcgaactttccatcttatcgaaaagtttggatacgaatgctatatggaggacttcgggggagaggccgcagcgatgttccctcaacgcctacgtggctgggcccgatatattgcaagcatcgaaccggacctggggtatccattgttgaggcgcattgatgagcttgtacccgatcaatatgtgtccgctagggacctggaggcctactacgattacggcgagtaccaggtgatagagagcgcagaagatctctatggatcagaggggcctgactactga

SEQ ID NO: 14340 - RNA, 960 nt, synthetic construct
  source 1..960: mol_type = other RNA
atggccaccttttctgtggacgacctggcacagcatgccggaactgatgtggagcgactcgaagagctgtcaagaggggtgttactgggcaacggcctgctgtttgagagcagatcacatagaaagcgtagggggggaattcgcgaaatcgtcaagcctaacccctggctggacagtattacaaagagtctgaaccggagttttttgcaggttctgccctatctaccaccggatcacgttcatgggtttgtgcggagccggtcaaccattacaaatgcgacagctcacctgggcaagaaatgtgtgctgcgagtggaccttgaggattttttcccttccatcggatctcgctgggtcaattccttgttgcagcaacagggttacgatgagaaggctgcaagcctctgcgttggtcttacaacgatcgcaggaaaactgcctattggcctgtccacctcaccgttcttgagtaatcttgccttccaggaaactgacagcgctctggccgaatttagcgccactgaggggttatctttcaccaggtacgtggacgatcttgtattctctggcgacgtcactgatgaacacctctcggccatcgaggggatcatttccaatgacggttggttaataaacctgcggaaaacggctttcatgcgccgtggtggacctcagtatgtcaccggcctctacgtgggtgggagcgatatgccaaggattccccgagaaatgaagaggtatatgagatggacactccacataatacgcaaattcggctatgaatcctatatggccgactttggcggggaagcgtctgatatgcggcctcaacgcctactcggatgggccagatacatcaccgcagtagagcccgagtttggcaggccccttctgggagctttcttcgagttgatcccactcgattactgtggcccagatgactgcgaggacatctactga

SEQ ID NO: 14341 - RNA, 969 nt, synthetic construct
  source 1..969: mol_type = other RNA
atgtcattcagtgtggaagacctgggtcagcactccggggttagcgtgcggatcctcgagagtctgtctgaagatctacctgcaggcgctggaaaattgtttagagcccagtccttcagaaagaagcggggcggacttcgcgagataattaagcccaacccatggctcgacctcattacaaagaatctgcggcgatcatttttggcagtactgccataccgccccccggatcacgtccatggcttcgtgaacggaaggtcaacagtcactaatgcctcagcacatctggggcgagcttgcgtgctgagagtggatctcgaagattttttcccttctatcggcagcgcccagttaaaagcggccctccaggaacaggggtatgatgataaagccgcatccctggctgtctctatcgttaccattggtggaaagttgcccatcggtctgtcgacctccccctttctcagtaatctggctttccagcatacagatcatatcttagcagagtatgccgaggccgctggacttagcttcacccggtatgtagatgacctggtgttctccggcgaagtgagcgaccagcacctagcagccattgagaggatccttaacgacagcggctggtctattaaccagcataagaccgcttttatgcgcagggggggccctcaatacgtgacaggattatatgtcggagcaactgaccacccccgcatcccacgtaaaactaaaaggcacatgcgttgggtgttgcacattattacgaagtttgggtatgacgagtacatggcggagttcgggggcgaaaatgctgacatgcttcctcaaaggctgctgggttgggcctgttacatagcggctgccgagcccgatgttgggtacccactgctcagagccttgaacgagcaactgccacctgcctacgtcccgcctaatggctggctgatcggcatagaagaccttgactga

SEQ ID NO: 14342 - RNA, 999 nt, synthetic construct
  source 1..999: mol_type = other RNA
atggccatcttttctgtcgaggacctggcgcaacatgctggggtcagtacccagacactggaagagctcgctgagagtctcccctcaggagcaggcacattgtatagccggctcacttttcctaaaaagcgaggcggctttagggaagtggtcagcccaaggaaaactctcgatgtggtgaccaagaaccttcacagatccttcctggacgtgttcagatacagaccccccgagcacgtgcatggctttgttaagggtaggtcaactatttctaatgcctcggagcacctgggacgcacttgcgtattaagggtcgacctgaaatcatttttccctagcattgactccacaagactgaaggccgccttcttggagagggtctacgatgaaaaggcagccgaattgtgtgttagagtcgtcacgattagcgataagctgcctgttggggtttctacatctccattccttagtaacctggtgtttcgagctaccgattatgctttgcttgactatgcacgcgcagaaggcctcggactgacccgttacgtggacgacctgtcattcagtggcgaagttgaggatagacacctttctgacattaccagaatcctagaggatctgggatggcgggtaaatactcgcaaaacagctttcatgcggcgaggaggtccccagtacgtaaccggactgtatgtgggggcacctgatcgtccacggatcccgaggaagacgaaacggcgtatgcggtggatcctccacgtgatttcccgcttcgggtatgagacgtacatgacagagtttggcgggctagaagctggcatgatccctcagcgattactcgggtggagctgctacgtggccagcgtggaaccggacgtgggtttcccattatttcgcgccttcagggagatccttccagaatcctataccccaccctcctactacgcgggcgagatagccggtatacggatcatacatgagctggacgatctgcgctga

SEQ ID NO: 14343 - RNA, 999 nt, synthetic construct
  source 1..999: mol_type = other RNA
atggtgactatcgaggatctgtcagagtatgcgggtacaagtgtagccaaattggaaaagctggccgatagactcagagagcgcgtggatttctcgacgcatgtgtacacgacctataataggggacgccgagaaattgtggccccagctacagcactggacactgtcaccaagaacttgcatcgcagcttcgtggcagaactgccctacaatcctcctctccacgtgcacggcttcgttaagggacgctccccgttgaccaacgcagcccagcacctggacaaagcttgcgtccttcgtgtcgatttgcgcgaatttttcccaagcatcaattctgaccgagtgggaactgctctccaaactcagggtttccaaaccgacgccttagagctgtgcacccgcatagtgactattaacggcaggctgccaatcgggctctccacatcccccctcatcagcaacatcgtcttcgaacctaccgactacaccctcgcctcttactgcgaatatgaggggcttgagtttacaagatacgtggacgacatgattttttcaggcgacgtggctgatcggaatctcggtgatattaaagagatcctgttagcagatggttggctagtcaacgacagaaagaccgtctttatgaggaggggagggccgcagtacgtaacagggctttttgttggatgtgctgataggccaaggatacccagacgtataaagagacagatgaggcgggtttgttatctgatcgaacagttcggctaccagagctatatggaggactttggcggagacgatgcaagaatgattccaaatcggttatatggctgggcccggtatatcgcgagtattgagccttctgtggggtaccctatgctgcggctgctgtcagagcatgttcccgaaaaaaacgcccacagtcttgatcagacacgattcgatcacattggcataactgtaccccggatcgtggagtccctggacgacctactgtga

SEQ ID NO: 14344 - RNA, 1014 nt, synthetic construct
  source 1..1014: mol_type = other RNA
atgctcgtgtctctgaaaagaatcgcttctgtcgctggctcttcggaaagcgagctccgtcaactcgccgacgaagttgaggaaggccagcactttcacgtgtatcgggctcggctgagacgccgcgatagaagcatctattggcccgacacaccctatgacactgcactgaaacagattaggcctgccctggagagactgctttcatacgaggccccacaacatgtgtacggtttcgtgaagagaagaagtaccagacagaatgccgctaatcacctggatgcagactgcgtgctaacaatcgacctggctgacttctttgcctctattaagagagaggcagtgatcggagcgctgggtgacagcggagccgataaggatgccagcgaggtaattggcaggctcactaccccacggggcgttttgggaatggggctgtccacaagcccgtatctgtccaatcttgtgttcctccgaacggacgacgaattggcatcattagcgacttccctggatattcgctttacacggtacgttgatgacctgacattctccggagccatagatgacaaaaaagcggagcatataaaggctgtattgatcagcaacgggtggactgtgaacgaccggaaaacccgcttcatgagacgaggacgtgcccagtatgtgacagggctgtccgtcagtgatgctgtcgcccctcgtgcacctaggcggcttaagcgacggatgaggtggaggttaaacatgatcgagcgctacggtttttacacctacgttactaggtttagtgggggctctgtggatagtatgttgcatgaagctgaaaggttgagggggcttgcacagtatatcgcctccgtcgagcccaaccttcgctcaggctggctggaacggtggtaccgagctgtcccaaccacctcacaccgattcgataatgagggcgacaccacgcgcttaattaagctagatgaagacgacataaggcgcctcctcgaggatgaggcccagtga

SEQ ID NO: 14345 - RNA, 963 nt, synthetic construct
  source 1..963: mol_type = other RNA
atgattccggtgacccccaccgtcctcgccaaaagacttggccactctgtgcccacattagagaatctggcacagatcgttcagtcaggtccaagtgatgatagctacaggctagtgcgcggagacagggaacttcgagtgcctactccccaactgaaggtggaactgctccccgtcgcggagtacctgagagcctctcttccgaggcctgcggagcatgtccacgggttcgtcaagaaaaagtcaattctaactaacgccaaagagcatctcggcgccccagtggtactgcggctcgatctgcgtaatttcttcgcaagcatccagtctgatatggtccatgctgccctgacgaaacacgcgtccttcaccgacgacgcggcacatctcctcgttgcagtttgcgtccctgagggccgattacctttgggattttccacttctcctgccttatcaaacctcgtgtttgacgagacagacagggccctggagacatgggccagtgccaaccacgtggcactcactaggtacgtggacgatatcgcagtttcgggccacgtagacgatcgccacctggaggatctgacgggaatactgaatgaacatcactgggtgctgaacgaaaccaagacattgtttatgcggcgtggaagatcccagtacgtgaccggtctgagcgtaagcgacccattgcaagctagggtgccccgcgcccttaagcggagaatgcgagctaaactgttccttatggagaagcatgggttcgacgcttatatgaagagctttggcggggatgaccggggagagtgtccacagcagctgttgggccacgctagatatatcgccatggttgaaccaaaactcggtggcatgttgctacgccggtttagtctggctattgaagaatccgcttatgcaggggaccctgaggaggggtgggaagcttgggccctggatttgtga

SEQ ID NO: 14346 - RNA, 975 nt, synthetic construct
  source 1..975: mol_type = other RNA
atgaatatttcacgcagggcgttggcagcccggttactcgtgagcaaccgatatcttgacgaagcggcctcacgggtcactgtcggcgatgcttatattctgttatcccttcatcgcagaagaggagaaactccacgtcaaatcttcgtgcctgatgcagccacagcctttctcgtgaagaaatttcacgaatggatcaccagtgtgggcccccgtcctccagatcacgtatatgggtttgtgcgggggagatctcctttggaaaacgcgaggcagcacctggctaaacaggctgtgctgcggattgacctgagggacttcttcccaagcatctcggcccagaaggtaagagaggcactcctgtctgtcggtctggacgcaagtgcagccgaggttgcgacaagaatactgaccgtgaatgatcagctacctaccgggttcgctagctccccagccctgagcaatctggtttttcgtgactccgacatcgctatttcctcatgggccaaggatcacggtttgacgtttacaaggtacgtcgacgaccttgtattctctggcgagatcggaacagaagctgtttcagccgccgtggctatggtggagaaaactgggtggcgcgtgaacactgacaagacccgactgatgaaacgaggcgggaagcagtacgtgaccggattagcagtcagtgatcccgtcaggcccagaataccgccctccaggaagcggagcatgcggatgaaactccacctgatcgagcgcttcggctacgaaaggtacatgcgcgagttccagggggaggaacggggtgatacgcctggccatttgcgaggtaccgccaggtatatggctggaattgagcaacccttcggcagcaacctgctcgcccgcctaaatgcagttcttccggaatactggagtatggaggacagatctgatccagattggctcgagtggctgggagactttcattga

SEQ ID NO: 14347 - RNA, 1764 nt, synthetic construct
  source 1..1764: mol_type = other RNA
atggttggcgccgtcgcttttgaatcctccttcgagcggacagaaaacctgatcgccgacttatatgaaggactagtcagcgagtcttacctggacggactcgactcctatgagcgatttaaaaccgaaggcttccacgcctggaacgacacggctgaagtatccactgccttcgtgaggttcctgagtcggaaccgagggtacaagagttacatctatttcaccgaccgtactaccaggccagatctcggggccgaccaaatgcacgctattctgtatcgcgacttactccgcaacctgtttcaagaatatggcagcaggagactgaggctaattttcgagcagaatcacaagctggactttgagctgatagcgacagaggcagccgagataagcgccgtaaggcccccgtacagcatcgaagttggacagaagagggcccctcactccctgtcaatcgtggattatgctatggctatcttttcacgatggagagatacagcctactccaccagccctacaaccaataagtttcgctcttggtgcgccattcggaggtgggtggctattgtgagaagtgtcgagcagggcgccctttacagaagaggccacccagtggtatccgaggaacggggggtggagactctgacaagtgaacttaacgcccgcgactcacggactcaggatgggaccttaagctctcagccgccctctgtagcaggaccgtctccagcccttgagcccctgggtaggactgagtttgtcagatccctaggcgtggattcccagatcctggaaagcgtaggcgcagcagttcgggagggacaactgtacagggtgcagcaaattcggaagagaagagggggtcttcgaaagatttattctccatccatagaactcaaattgattcagaaactgatcagagaggagttggagtccgctttagtgtacgaggaccaccctaatgtgttcggctacattagcggtcggagtattatcgataacgcccgggttcatgttggcgcatcagtggtgcttcgcgtggacctcagggacttctttgcttcgataacgtcagaccgtgttgcgcgcgcgttgattgatcacggtgcaacacaggacctcgtctctctactggtgcctgtgctgaccgccgatggaatactccccgccggtttccccacttcgccattcatctccaatctggccttcagacatatggacgaggcccttttggagttgagcaattcacatgggcttgcatatagtcggtacggggatgatctcaattttagcggcgaaatcgatcgcgatgacgcttttctgaaactggtcgaacgcaccctggagttagatggctggaccgttaaccaaaaaaagacgagattcatgaggcgcggggggagccagtatgtcacaggcttgtatgtgggtgactctgttccccgggcacccaggaggaccaaacgtgctatccgcgcgcagtctcactttgtgtcaaagcatggattcgatgacatcgcacaggcgagagggcaccgcgtgaacactcctgctcgactcgcaggatggctgggctacctccagcgttttgaaccagacttcgtcgacaatatcttgggagtgggcgtcctgacactcgaagatgatcgggctggtagccgtgcagccgtcgacagttctgcccgagggtgggatgagtacctgtcaagaggagtgctcaggcatggcaagggaagcttgcatcgagctgatcctagttga

SEQ ID NO: 14348 - RNA, 981 nt, synthetic construct
  source 1..981: mol_type = other RNA
atggacatccgagcttttctccgacctatcgggttgacggagccacagctacgctccctgggagatgaaataagggccggtgcccgttatagcaagcggagagttcgtaagaggcatggcggatacagagatatcgccgtcccagatgtcgagctgaaggcagccctgaagctgctgagaatacgcctcgagtgtgttcttccatacgaagcgcccgacatggtgttcgggtacgtcgcaggcagaagcatcgttgacaacgcgagccagcatctcggccaggcctgtgttgtgtgcgttgatctagtggacttttttggggccatcaatggccgccggctagagagtgccttgctctcccagggcttagcggaggacctggtgcagcttctgctgccgattcttgtggtggacgattctacccctccgggtttcagcacctccccaatgttatcgaacgtagtattcgaggctactgacagggctttagaagaactcgccggcgagcaacgggttaggtattccaggtatgctgatgatctgacattctctggtcaacacgtggatgactctctggtcgctcgggtggatgctgtgctcctgcgccaaggatgggtgctcaatccacggaaaactaggtttatgagaagaggagggcctcagtacgtgacaggactgtacgtgggagatgcagctaggcctcacgtcccccggaggattaaacgccgactccgggcatggttccactatattggcgagtttggctactcagactgcgaggcaagagtcgcacttccctcagggcgccagcttgaggggtggcttcgacacgtgaaccaggtaaatcctgaagtggtccgttcaattgtgaacgacctggggcatagtgatttgcacgtagccttcggtgccatgggactggaactgaaaggcccccccagagacgactgggacgaactgctgggcgaattgggtttgtga

SEQ ID NO: 14349 - RNA, 981 nt, synthetic construct
  source 1..981: mol_type = other RNA
atgattgacctcgccgatctgggctccgcaagtgctctggatgctgatgagttcattcgctggtctaatctgattgccgccggttctggatattctaggatgtctatcccacaaagacggcggcgccctagggtggttctacgaccagaggtggcactcgacagatttctgaaacagcttacaataggactaagtcgtatcagcggatatatgccgcccgcagctgtgcacggctttgttaccgggagagacatcgccactaacgccgccgttcatttggaccaggacgtcgtgcttagggtcgacctcaaggatttcttcggcaccatcaacgaacaacgtctggtacgcgccctgggcgactatgaattcgatgaagatgctgcagacgctgtggcgggagtggccttagtcaatgatgctttggcccaggggtttagcaccagcccatttctgtcaaatatcgtattcacggagagcgacgccgagttaacaagcttcgcggctcgggctggtgtcagttacactcgatacgtggacgacctcaccttctcaggtccctacgagtccgtgaatgatgagctcctggaagccgcatccgcactgctggccgacttagggtggagcgttaacactggcaagacaagatttatgcgcaggggcaagcctcagtatgtgacagggctgtacgttggggattcagccggaccccacatccccagatccatgaagcgcctcctgaggcgggaggtgtactttgcatctaaatatgggcttagggacgcacggttgtcgtccccgacccctatgctccatgaccgacttaatggctgggtccattacgcggctcacgtggaccctgtatttggtaaaaagctgctggtggcctggaacgacgtcgcaagtcggagatacgcggatcgtgagtcagccgaatgggatgctattttggaagatataaacttcccagaggattggtga

SEQ ID NO: 14350 - RNA, 978 nt, synthetic construct
  source 1..978: mol_type = other RNA
atggtgtccattcgggcagtggcgcatgcctcagctctcgatgtcggtgaactgcttcattggcagcaattgataagttcaggcgcaggctatacgagaattactattccacagaggcgtcgacgcccacgagaggtcttgaggcctagcgtcggcctcgacagagtgctgaagcagttgaacatcggactggctcgggttagtaattacagccctccccatgccgtccacggattcatcagaggcagggacattcggaccaacgccgcacagcacctggataaggatatcgtgcttcgagtagacctgcgcgacttcttcggctccatcgatgcatacaggcttactgacaccctcacaggattcgggtttgaccaaaacgcggccagcgccgttttaggtgtaacaattgttaatggcagcttggcccaggggttttcaacttcgcccttactaagcaatatgacgtttgccgacgccgatctggcactgatgaaactagcggccgatgtcggagtgtcttactcccgctatgttgacgatcttactttctccggcagctttggggaggtggatgatagattactgctcagaatcacagacgtgctcgaaagtgctggatggatagttaatagcaacaaaacccggttcatgcgaaggggtaaagcgcaatatgtaaccggtctgtacgtgggagacgctgtggggccgcacattcctcggagtatgaagcgcctgctccgcagggaagtgtattttgcctcaaagtttgggatagacaacgctagactccgctcccccaccccaatggagcacgacaggctgaatgggtgggtgcactacgctgcccatgccgatccacatttcggccagaacctgagggacgcatgggctacagtcgactcccggcgtcccgcttctagatcttctgcacaccgggtgcagatcctggatgagatcgatttccctgagtcttga

SEQ ID NO: 14351 - RNA, 990 nt, synthetic construct
  source 1..990: mol_type = other RNA
atgttcgaggtagacgtggagacactggcatcggcctcatatatgaagtcagccgatgtgctggtgcggtggggggagatgctccttatcgaaggcctgggctacacgcgcatagctgtgcctcaaaaacgcaggcgaccaagagaagtgttaagacctaatatcgggctggaccgggtgttgaagcacctacgactcggcctggcttccaccagcgggtatgaagcaccagatgaggtccacgggttcgtccagggtcgtggtacggtaacaaacgctgcctgccacctcgcgcaggatgtggttttgaaagtcgacatcaaggacttttttgatagtatcgggtctgaggaagtctgtagcgccctgactaggttcggcttcaccgacgagtgcgccgaattggtcgcctctgtgaccctagttgatggaaagctggctcagggcttcagtacatcccctcttctttcaaacatagccttccacgcaaccgacgaggctctggcaggattcgcgcatactcggggagtgacttttacacggtacgttgacgatctcgccttttctggaaccaaagacgctattgatgatgagttcctggaatccttagatgtacagctgggcaatgtgggatggaggatcaacccagcaaaaactcgcttcatgcggaggggaggcccgcagtttgttacaggcctgtacgtgggggaccatgcaggtgcgcacattccccggcccatgaaggaacgtctccgcagggagctttattttgccgaacgctttggtgtgagcgacgcaaggcagagaagccccagacccatgagtattgagagactcgccggatgggttcattacgctgctcatgccgatcctgctttcgggttgcccctgcgagacaggtggcaaagaatcgccccggccctggattcctatgtccctggcccagactgggacttactagacgatattgagtttccagatgactggtga

SEQ ID NO: 14352 - RNA, 978 nt, synthetic construct
  source 1..978: mol_type = other RNA
atgatcgatgcagatagccttgcacaggcaagcggaatgaccgccggctacctagcacatttgggcgacctggtgcagaatggaaccggttactctcacgtggtgattccacagaagcgccgcagaccccgcgaagttctgatcccaagtgtggcgctcgacagagcgttgaaacaactgcgaatcgggctggaaggacgtagctcctatgaaccacacgacgctgtgcatggcttcgtcgctggccgggacatcgtgaccaacgcaagccagcatttggggcaagacgtggtgctccgagtagatcttgctgatttcttcggcagtatagaccgggataggctgaagtcctccctgggtagtgccgggtttgccccttcgtctgctgaaatgatcgccaatgtagctctcgtgaatggggccctcgcccagggattttccacttcaccccttttgtccaacatgtcttttcaaaacaccgacaagatgatttctgatctcgccaaccagaaaagcgtcacgtatacacgatatgtggacgacctggtgttttctggtgatatgtacgccgtcactgatgacctgtcaaatgcgattgagactttactgcaggaagagggatggaaagttaacattaggaagacgcggtttatgaggcggggtaaatcccagtatgtgacagggctctacgtaggcgatgcagatcggccccacatcccgagaggaatgaagaagagattacgccgcgaggtttattttgccagcaggtacggcctgacagatgcccggcagcacagtcctactccgatggacccaaaaagactgggcgggtgggtccacttcgctgcatacgctgaccctgtcttcggcctaccccttagagagacatggagggctgccgttaggtcagatcctccacccgagtcacgtacctgggacagcgtcctggccgacatagggttccctgaggactggtga

SEQ ID NO: 14353 - RNA, 981 nt, synthetic construct
  source 1..981: mol_type = other RNA
atgaccaccacccgggacttggccactcacggaggaccttcaccgcaacagtatccattctgggctgccgtgttagccgcaggccatggttattctacattggccatctctaaaaggaagagaagagagccacgggtggtgctaaggcccaacgtcggccttgataggtttctcaaacaggtgagcaccgcgctcgtagctggactggacttcgcccctcacgacgcagtccatgggtttgtggccggtagaggcattgtttccaatgccgcacagcacctgtctcaggatgtggtactgaagctggacctgcgggactttttcggctccgtccgcagagaaccactgactacagctctggtgcaggccggcctcgatgagccaacagcgagcgaagtcgcagcagtggtgactgtgaacggctccctgccccagggattcagtacctcaccactgttgagcaatgttgcctttgatcctactgatgacgctattcaagcgatagctgctagtcggggggccacttactcacgttacgccgacgacctgacattcagcggcacgaacggggcagtcgatgatacacttctcagcgacgttgtctccgctttagaacaccagggctggatcgtcaatccgggaaaaacgcgcttcatgcgcagggggcgcgctcaatatgtaacaggactcagtgtggacaccgccgatggtccacacgtacctagggtgttcaagcaaaatcttcgcagagaaatctactttgccacccggtacgggatctcagatgcccgagtgcgatctccccagcctttacgggagtcgcagctgcatgggtgggttgagtttcttgcgcacgtggagccccatcgtcgtgctgagctccgagaggcctggaagatcattgctcccaggccttccgcacgcagagttgagctatgggatgaactgttggacgatatagacttccccgcaaactggtga

SEQ ID NO: 14354 - RNA, 987 nt, synthetic construct
  source 1..987: mol_type = other RNA
atgaccgtggtgcagcagaagttagtctggcgctctctgaaatggcaattgcaggtggtcggctcaatgaatggccgactgccgaccactagtgagagctcagagtggagacaatgggctatggaacacgcccgccctgtgcgattcagggggagagacggatggcgctccgttggacctcttgactcccttctcaagcgtatgaccgccgcgctgcagagcctatatgtggcgcctgattccgttttcggcttcgtgagtgggaagtccacctattccgccgcccaagtccatgtgggtgccccaagcgctttggttgtcgatctgaaggatttctttggtcaaatatcggaacagcgcgtcagagatgctctcaatccactgctcgacgaagaggccctggacgtgtttgtagggtgctgtcttaggagcaatacactgccattgggctttaggacttcgcccctaatcagcaacctggtgttccgggagacggaccgggacatcgagcgcttatgcgcagctcgggccgtaaaatacactcggtgggtagatgatctggtgtttagcgggagcgcagtggatgacagtttcctccacgaccttctcgcggtcctggattcacatgcctggctgccgaacgaaaagaaaacaaggttcatgtctacacgtagggtggtgttgggattaaacgttgcacagtctctcacacggccccacgttcctagaggcatgaaaaaagagttgcgaaagcaggtgtactacctttccaagtttggaatggcccatttttcacacgcaggtgcctggcccctacccagaattctgggaatgattgcttacgtcaagtccgtagacccaaacctggccgcactgctcgagcagcagttgcacgcactgcccaaatcttctaggctggttgcttattctagtgctgtgggagggggcagatggcagatggctatgctcgaagaggtcggcctgtga

SEQ ID NO: 14355 - RNA, 912 nt, synthetic construct
  source 1..912: mol_type = other RNA
atgctcccagcctcggcgtccttgtccgagtgggacaattgggctggggaaaatagtcgaccggttagattcagaggcagggatggatggcgatccgtcgggcctctggactctctgctgaagcgcatggccggaactctgcagtccgagtactcagcacccgatagcgtttttggttttgtccccggcaggagtaccttttcagccgcacaagtacatatcggcgcggaaagcgcgctgacagtggatctgaaagactttttcggccagatcaccgaacagcgtgttcgggctggcttgggtcatgtactcgatgcagaggccatggacgtctttcttggatgctgcctgcgcagctccacattgccactcggattccgcactagtcctgtgatttccaatctggtgttcgccgagacggactataagatcgaggagttatgtgcaaggttatcagtgaagtacacccggtgggtcgatgatctggtgttttcaggccccagcgtggacgacgccttcctagctgaagtcctggatatactaacttcttttggctgggtgtgtaacgaaaagaagacccggttcatgtctacacgtaggttcgtgctcggattaaacatcgcaaagggactcgaccgacctcacgtaccaagaggtatcaaacgcgagctgcggaaacaggtgtattacctgaggaagttcggggttgcccacttcagcaacgatagagcctggccacttccgcggatacttgggatgattgcttacgtgaaaagcgtggatcccaacttggctctcagactggagcagcagctggtccaactgcctaaagacccccttcttgccgcttattctagtgcagtgggcgggggtaaatggcagctcgccatgttgtctgacattgggatgtga

SEQ ID NO: 14356 - RNA, 927 nt, synthetic construct
  source 1..927: mol_type = other RNA
atggtatacatgttgccccggcgggctctgctcattagctgggagatcttcagcgtgagaatccagttagctgacctcccccctagaagtgcgcctgagtgggatgcatgggcccgcaaaaatgaacgcgtcgtgtctttcaggacgaagcatcggtggcgccaagctcgaagggcaaccggtaggctggacagcgctcacaaacaggcccgtgcacttctagcagccggatgggcaccgagtgctgccgttcatgggtttgtcaggacaaagtcaactaaatccgcggcaatggtgcattcaggcgctcgcgcagccctgactcttgacctcgccgatttcttcggacaggtcacatttaaccgcgtggtggataatctgaggatgagattcgatgaccggtcttgtgactggatagaaggcgcgtgctttcgtgacggagccattcccctcggctacagaacctcacctgctctgtctaatttggccttttccctgacagatgacgagatcgcagacgtggccaggagacacggtgtggcctatacccgttgggtggatgacctgaccttctccggggccggggtaagcgatcagttgttagccgatgtccagaggacactagccggccaaggctgggcggtcaacgacagaaagacccgctttatgcggcggagtccctacgtccttggcttgtacgtgggtcatgacgtggatcgaccacgcctcccacggcgaatgaagcagaggctccttgtggaaacttatcacttctccagactggggtttgaacacttttcgcacgaaggcgttatgagcccttcaaggctgttcgggagagtagcttatgcctccgtgattgagccagagctggctgagctgctgaacgagcgggttgatgctggacaccgagttggaagatcttga

SEQ ID NO: 14357 - RNA, 906 nt, synthetic construct
  source 1..906: mol_type = other RNA
atgataacctggttacactttagtgcccgtcttggtctgtatgatcttgagccaaggtcggcgagcgattgggcaacctgggcaagccggtatcgagtccccgttagcttcccggtcaggggaggtcgcagggtgacagtaaggagcgtcgggcgtttggacctgagtctgcgggcttttaagtctctgattgccgaagtgtcgttcccacacgcttccgcccatggatatgtgagaggccgcagcacggtatctgctgccacaccccatgtgggtagcagtctcgtgctatctgtggacctgaagaatttctttggccagatcgacttcgctagggtgtcccctgtactggaggcttcttttgatgctcaggtgtgccagtggatcgagggtgtttgtttcgtgtccggatccttgcctctcggctaccgatcttctccggccttatccaatattgcctttgcctccgccgatctggaaatattcaactttgcggcaaaggccggggtcgagtatacccggtgggttgatgacctgtcattttcaggcgaaggagtgggcgacggcttcctcgaagggcttcaggcattgctggccgacgaggggtggctggttaacgctcggaaaactcgttttatgaggagagcaccctacgtgctgggcctctatgtcggccgggatgctactgagccaagattgcctcgccgcatcaagcaaagacttctcctagagtcatactacttcgcgaagtacggaatgagtcacttcgacagaccatacgtcctgccccctctcaccctgttcggatacatgagctacgcctattcagtcgaacccagactggcaacagttctcggggagcgaattgtgaaagggatcggcaaatccgggggacggttacgctga

SEQ ID NO: 14358 - RNA, 972 nt, synthetic construct
  source 1..972: mol_type = other RNA
atgacactctccagagtgcgggagctggaattaaaaatgggctacgccccaggatccctggacagacttgcgaggatattcgatgccggagcaggccactcagtaattcgaatctctagcggcaaatccaagaccaggcacgtggttaggccaactgtggcactggatgggatgttgaaatcactcaggcgagtcctggaagccgaattggggttcgaacctatggactgtgtgcacggctgtgtccgcggacggagcattttaacgaatgcaagtatgcacctcgcccgtcccgttgttctgcgcgtcgacctgaaggacttctttgattctatcagcacttcagacatctctgatgcgttcaaggtgttggacgtcgatgacgaaaccgccgagctgctggctcgatgcaccaccattcatggccgcatgcgggctggcttaagcaccagtcccctgctcgctaacttggtgttcaactcaactgatagggatctccaagagatcgccgcccggctggatcttacctataccaggtacgtggatgacctggtgttctccggagagacaatcaccgatgacactctcgccactatagcagaacagattgttgctagagggtggacaattaatgcccgcaagacgcgttttatgagatcggggggagctcagtacgtaacagggttatctgtcgatgtggagtccggtccccatcttccgagaagaatgaagagatttctacgcctggaagtacactatgcgacactgcatggctttggaagtggtagcacagggaagaggcggcttataggcctcatcaactatgctaaatgcgtggaaccttggctcggtgccgagctgcatgactctatccgggaggcaggactgctagtgggtcgcagcgagagtgaggatgcatttgaggacgctgaagacttttgggacgagcttggcttgcgtgacgagtactga

SEQ ID NO: 14359 - RNA, 963 nt, synthetic construct
  source 1..963: mol_type = other RNA
atggcggtcactgtggaccagattgaacgtatgatgggcgtcccacccgggacactcgacaagacggcacggattctggaagctgaaaccggattcacgatactcaggataccctcacgaaggggcaggttccgcagggtggtccgtctgaccaccaccctcgactcaatcataaagggaattcgcagatccctggaggcgcaactgtcttttgttcctcgggattgtgtgcatggatgcgtgaagcagagaggaattctgactaatgctagagcccacgtaggaaagaaagttgtactcagaatcgacatccggcggttctttgagtctattagcgtgagccaggtggaagatgcactgcgcacaagcgaggccgatcccgagtcgagcgctttagtcgctcgctgcaccactctgggtggtttcctgcctgtaggattctctacatcccccttgttagccaacatgattttcgatgggacagacgcccttttgggggactgtgccaagagctactctctttcatacaccagatatgtcgatgatctgtcctttagtggcgaacatctcgatgatcaaatccgactggagatcgaaggcgtgctaagatcccaggggtgggaaatccaggatcgtaaaactaggtttatgcgggcaggtcatgcacagtacgtgacaggcttgagcgtgaacgaccctaacggcccacatatcccacgcaatatgaagaggtttcttaggcttgaggtgcaccacgtggtccgaagtggcttcggcgccagtgtgctgggtaaaagaaaactgctgggccacattaatcacgttaaacacgttgactatgacctcggcctagagctgcatgacgccatacggtccgctggactccttgttgggcgccctgacgacgagtctccggaggatgggttagagttgttttgggaagatatcgggatcgacttctga

SEQ ID NO: 14360 - RNA, 978 nt, synthetic construct
  source 1..978: mol_type = other RNA
atgagaagcgcagcccgactggggtttgttgccggtgtcagggcatctgctctccagcaaatggctctcacatttgatcgcggtcttggctactcaacgctggaagtgccaaaacggggtggaggatcaaggaccgtattgcggccagtcagtgaactcgaccacaatctaaaactgctccgcagaggtatcgatactctaagctcttatagtcctccggagtgggtgcatggcttcgttcctaagaggtccattgtgactaacgcccaagcccacctgagcaaggagattgtactccggctggatctttccgctttctttgagtcgatcaaaaagagcgccgtgcgcgaggccatgctgagattcggcttcagtgatgacgcttctaccctcatctcagattgctgttgcattcacgggtcactgcctgccggcttctccacttccccaactttgtccaacatggtgttcttacccaccgacgacgccctgcatgagtgggctggctctaggacccttacatacacacgttacgctgacgatcttacattcagcggaacagatatcacagatgatgattgtgcagagattgcccgcatgctgagcagtgctgggtatgcagttaatgcgcgtaagacccgatttatgagacgcggaggaccccagtacgtgacggggttatacgtcggcgaatctgaccaaccccacgtgccgagacggatgaagagattgctgcgacagcaggcgtattacatagctcagtacggatactccgaggcccagactagatcgtctaggcagttcaccccctatcagctccgcgggtggataaactatatgggcaccttgcacccagagttagcggcaaggctgcggtgcgccatctttgcacggttgcctcaggcaccagaaaggcccgaccctagcgattattgggacgacctgctggacgaactgcatatccccgacgacttttga

SEQ ID NO: 14361 - RNA, 993 nt, synthetic construct
  source 1..993: mol_type = other RNA
atgcgggaatcagcaccccgcactttctcccatcgtgaagaagctcctatgactattctgtccgacacgctcacactggatgaccttgtcatcgccgccactctgcctgacacagctcgagatctaatggaggaacctgtccgcccatggcagctgaacaccattacagtgcgtaagtcaccgggcaaatttagacgggtagtggagccaagggacaattcactagcacgcgtgcagaaaaagctcaaagagtttctggacagggatgtgctggagccacatccctgcgtacacggttttaccagagacaggggaccgtacactaacgccctcgctcacttaaatgcccgggcagcgctgacgatcgatatatctgatttcttttcctctgtgagcagtgacgacgtgcaaagcacactggtttcgttcggggcaagcaccgctgttgccaggggaataacaaatgtttccgtctttgagaacgtattggcgaccgggttctctacgtctccagttctcagcaatatgtactttagagacactgatgacgtgttggccacctttgccgaggaattcaaccttacctacacccggtatgctgatgatctcactttcagtggagaggacgtcgatgacacccatcttgccgaaattacacgcgttctggaaagcaaagggttaagagtgaaccagaagaaggtgcgcttccaacggagtggccaccctcagttcgtcacaggatatgtcatcgcgcatagggaccaccccagagtgggtcggtatttcaagcgacagttgcgcctggatctccactacgtgatgaagcatggcctggtacaccaagctcagttacgaggcttgtcaccccaggtgcttgcaaaacagctcgccgggaggatcaactaccttatgtgttccgagagagacttggccgtccacctgaggcagaagtacggccacctgctggacgatgtggatgagaatccctattga

SEQ ID NO: 14362 - RNA, 1008 nt, synthetic construct
  source 1..1008: mol_type = other RNA
atgcgcttcgcgcgggtcagttatctggtgggcattgttgtaattggtgacttccgggcgccacatccacgaaaggaggaggtgagcattctgaaagatctgaggacagctgaagagttacagatcgccgctgccctgcctgattccgcacttttgtggctatgtagacccctctcagctgaagacatctacgtccacgagatcagaaaaagcaagggccgcttcagacgcgtctatgaaccgagagacaacagcttagcccggctcctgaagcagctgaaggagtttttggacaggcaagtcttccagccccacgctaatgtccatgggtttataagagacaggtccatctttacgaatgcaaccgcccatcttggcgcacgagctatactggctgtagacatatctgacttcttctcctcaattagtcgggatcagatcactggcgccctgatcagcctgggcgcaagtgatcaggtcgccgtgtctattgcgaatgtgtgcacattcagaaacgaactagtgactggtctgtcaacctctcccgtgctgtccaacttggttttcctccctcttgataaaaattttgagtccctcgctgttgagcgtggtctgacctattctcgttacgcagacgacttaacatttagcggggatgccgtagacgaccagttgctggccgtggtggccgaacggttgtctgagcacggattcaagatcaacctcaagaaggtgcgctttatgaggaaaggacaccgacaggtggttaccggagtgtcagttgcatgcggagataagcttcgtctgcctaggaactttaaaaaacgcattaggcaagatctctactttagtgaaaagaatggcatcagccttcaggctctgcaccgcgggttctccaacgacgaagattttcgggagagtctgaaagggaagatcaatcatctaaactcggtggattcttccgccgccaaactcttcatgagccaactcaataacattagctcatga

SEQ ID NO: 14363 - RNA, 987 nt, synthetic construct
  source 1..987: mol_type = other RNA
atgcaccctgtcggaataaacatcgagcgcatcaaaaccctgattgagctggctagtttatttgatgtgtcagaggagatgctacagggtttcatcgataaccacgatgaattagtggccagagtcctgatgctcaaaaaccggtctggggagtataggaaaatagtgtttactaagagcgacccttaccgtatcttcctccggacgctgagcgcattcttgtacgagtggtattcacaccgaatccctgatagcgtccacggatttgtgaagcggaggtcgattatcacgaatgctcagcagcatactcaaaaaaagtctgtcaccaatatagacatcaaacatttcttcgagagcataacatttaaggaagtgcatggcattttcatcaaagtgggtttccaagacaagattgccgggaagctgacagaactggtgactgttgacggcgtcctcgccgctggatttgcaacctcccccgtactctccaatattgcatgcttggatttggacgaagattttaagaacctggcaaacgaacacggccttatttatacccgttacgccgatgatatcaccctgtccagcaataaagagattcccagtaaggaggagattaaaaacatcctaatcaagtacggattcgagattaacgaaaataagtaccgcatttatcgacgcggcggaccgcagtacgttacagggctctccgtagttgacaaaagaccacggcttagtaagaagtttaaaagaagactgaggctcgaactttactacatcaagaagtatggctttatggaccactgggccaaggccatcaaaagggcgatcgacaaaaatacttatccatccaggttctcacaggtggcgtacggcggttgggggttggaaggctttgctgccttcattcattctgtggaacccaagcttggttctaagatattcaaaacactgctgaagcgcggggaggacgagatgtattggtga

SEQ ID NO: 14364 - RNA, 981 nt, synthetic construct
  source 1..981: mol_type = other RNA
atgttccccacgaacatcgacatcggcaaaatcaagactctgagtgaattggcacctattcttagcgtttcggagtcacaacttaggtacttcctggaatctaaagagtcactgatcaaacggggcctcatactgaagagaagtgggacctttcgccgcattatgatggcaaaagacgatagctttcggcactttctgctcaaacttagctctttgttctactctaaatacgaactccacataccggccgcggtgcatggatttgtgagggggagatccattgtgactaatgcccaacagcatacccagaagaagatcgtcctcaatgtggacatcgaaaacttcttcgattcaatctctttcgaacaggttgtcgccttactgatttcctttggtttccaggagaatatcgcaaaggtgctggccgagttgacaacagttaacggcattttggctaccggcttttctactagtcccgtcctatccaatatggcatgcatagtaatggatggggtcttcaagtcatggtccaaaaaacgaaactttacatatacgcgctatgctgatgatctaacatttagcagcgagcagtatgtaccagctcagaaagaaatcgccgaaatactgggtcatttcgggtttaaaatcaacctggataagtacagggtgtataggcgaggaggaccccaatacgtgaccggtctgactgtggtggacaagaggccacggttaggccgaaagagaaagagaagtatgcgtctcgagctctattacattaagaagcacgggttcctgaatcatttctaccacgccctggaccgggccacaaagagacacgagctgccaagcaaattcacccgcaccgtgtttttcggatatggcgttgacggatttcgcgcctttatgcactccattgagcctcggcttgcgtgtaatatgcagcaggtcttaaaaaaggaggctcctaaggctcgtaactga

SEQ ID NO: 14365 - RNA, 1329 nt, synthetic construct
  source 1..1329: mol_type = other RNA
atgcctggtggggacggcctcagatcttggcgtcatgcttccgcaccatttcggaggtgtttgcggcttcccaggggagcgctcaggagaattggccaaaagctgcggctcccccatagacttagaaggcgacctacacccaggaggcagaaagctccttacaccgttgatgcgggcggtgccgctgcacttgggacaagtagaccaagagatcacgttatgtgtgaaaaccctgctatggccccccccgtcccgctttttgaatttacctgccaccaatcagtcgcctctcttgaagtccccttgggcaagccgactcatgccctggagcacctggcgacgacgtgcgattcaggaggagcataccaactgaattacttttggattcgcaacaagctgcggtccgttagcgctccaaaccatcagctcgatctggtgcatcgacgcattaactctctgatcttccctgtggacctggcaatgcgccgcgaggtgaatggattcattgcacgccggagcaccataacaaatgcacggccacacgccggcgcaaggtatcttcagaaattcgacatcaaggacttcttcataaacatccgcacactccaggtgagagctgcgctccgcaacatagggttcggtccaggggccgcaaccatgctatctcgattagtaagctgcaatgaccgtattcccttgggagcccgaaccagtccgagaatcagcaacttagtgctcatgtcctttgatgacgccatgatcgctctcgccgacgagcgggacttggcctatacacgctacgctgacgatctaagctttagcgcccaagcgatgtttgatgtcagctcagaggtgagggctgccctgacatccagtgggttcgagttgaatgcctccaagacaaaatctttcaagcacggacagccaatgtttgttactggcctggccatctccgatgcatctaggccaagactacgtaaaaggctgaaatcgcggctccgccgggagttctattttgtggagcggtttggactggctggtcacgccaataagatcggggcccacccagaaaggactgcctcaagattgttaggccagttccattacgcgcgatccgtggagcctgaatttgccactagactggaggccaaatacccaaccgcttttggcgaactgattcctcagcgaaccgacgacagagtggagcgtgcacagcggtcgaggcgtgaattcctgaccgatgtggagaatgctccccagcagacgctgcccttctatactcctactgcaagtctgcctttcgtacccgcccaccgcgctgtcgaatga

SEQ ID NO: 14366 - RNA, 1074 nt, synthetic construct
  source 1..1074: mol_type = other RNA
atggctcctctgactagacagttggagtttaccttccacgaaactgccgcatctcttgagagcgtgctcggcaaaccatcatccgcaatcgaagccttggcctcctcctgcgatgctggcaccgcctatgaggtgggcgtactcagtattcgacgtaaattgcgcgtcattcgtgtaccggagcgcgagttagacgccgtgcacagacgtataaatatgttcctgttccctgtcgacctgagcatgaacccacacgcacacggatacgtggcgcgcagatctacactctctaatgcctcccctcatgtgggagctacattcctccagaaattcgacgttaaggatttcttttcatccgtttcacgcgaacagatcgctggagctctgactcggatcggcctcgggcaagatgccgcacagctgcttagccggctggtgacctgtcagggggagttgcctctaggggcaaggacttcaccacggatatctaacctggttcttgccgattttgatgaatctatcggagcagttgcctccgatgccggcctgacatatactcgctacgcagacgacctcaccttctcgagtcaatcggcttttgatgtgagccacgaggtccgaacgcagctggaattaaggggttttgaactgaacctggcaaagagtaagtcttttcgctacgggcaaccaatgttcgtcacggggctcagcataagcgacaaaaccagggctagagtaagaaagaggtttaaaagtcggctgagaaaggagttctattttgtggagaagttcggtattgagggccacgcggaagccattgatgaggacgagcatcatgccagcgctcgaatcatgggccaattccattatgtgagggcgatcgaacccgattttgccgctaaacttgcagccacctacccgacagcgttccagacacttatccccgaaagatacgacgaccggattgctcgggtccagaggaagcgggacgagtttctgaccgacgtggccaggcagcccggtttacatctacctgtgtacttgcccacaactcccctgaccgtcggacgatga

SEQ ID NO: 14367 - RNA, 1071 nt, synthetic construct
  source 1..1071: mol_type = other RNA
atggcgcctctcgaccctctttttgaataccgagtgcatccaactcgtgcatcactggaagcccccctcggaagagactccatgaccttggaaggcctggcagctaggtgtgatgagggtgatgcttacgtcacaggttttatgaccattcgcggaaagtccaggttcatagctgcaccaagacctgaacttgatgcggtgcagcgacggatcaatcttctgctgtatccaattgatctgagcctgggcgcttcccctcacggctacgtagccaggagatctacattaacaaatgccagaccccatgtcggcgcccggtttctccagaaatttgacgtgaaggactatttcgcgagcatcaccgcgtctcgaatcgccaccgccctgactgagttagggttcggctctgaggccgctacactgatttccaggctcaccagccatcgcttgagacttcccttgggagctcggacttcaccgcgcatcagtaacattctcctgattgactttgatgaccagatggaaaacctggcccgtgagcaggggttgcggtatacccgatatgccgatgatctagctttttcctctcagatcgccttcgacgtgagtgaccgggtggaacaggcaatacgtgccgccgggttcgagcttaaccctatgaaaaccaagcagtttaagcacggccaacctatgttcgtgaccggtctgtcgatccaggatgccactcgcccaagggttcgaaggcgcctgaaggcacgcttgaggcaggagttctactatatcgaaaaattcgggattgaggaccatgccgctgccgtaggggagagttggaggggagttctccacagattaactggacaatttcactactgcagaacaatcgagccccagtttacggctcaactaacgctcgactttccagctgcatcatcaagcgttgcaccagtgcacgaagacagccgcgtagaaagggcacagcggcaccggagagagttcgtggcagaggtcatgcggcaactgcccacagctatacccttctacgtcccgcaggccgatctgttcgagaattga

SEQ ID NO: 14368 - RNA, 1083 nt, synthetic construct
  source 1..1083: mol_type = other RNA
atgtccactccagccggccctttcgattatatcctgtccgaacagcatctggctagagctctcggggtgccagtagctctgtttgaatacgttgggaacctggcagagatggggaaagcttacgagtaccgtcggaaatctatccatggcaagatccgggagctaggagtgcctgtggattcagtcatgtccttacagcgaagaattacggacttcttgtggcctttgtccttagagctgcatcccgcctgtcacggatatacccccggccgaagtgccacgactaatgcagcaccccattgtggggcgcggtgggtacaacgccttgatatcaaagacttttttccgaggacaacaccaaacatcgtgaccaaggccctagttgagagaggagcacatcagacagtggctgaacttctgaccaagctgacaaccgatcgcgggagtttgccacttggcgccccttgctcaccgctgttgtctaacctgatccttacccccgtggataatcgagttgccgatcaggccgccagcattggcgtgagctacacccgctacgctgacgatctgacattttctgcagacgccgaattcgacatgaccggagtggtccagtctgcgctccagcctctgggatacacgctcaatttagaaaagagccgcttacggcggcgcggtcagtcaattgccgtcactggcctgagggtcgccgagatggatcaccctaggctccccaagcgttttaagagagaactcagacaggagttctatttcatagaaaaattcggctttgccgaccattgcaacacacgttatttctggcactggatagacgaggaagacgacgagaaacaactggaccacagtactagacacctccaaggtaaggttaggtatgcactgggagtggaacccgactggatgagggccctacttgatgcccacccagtggctgcgagcgagttgactccgcccaaaagacaccaggctgatcaacggctggcggctctcactgcactggctgcagagattgtcggtaggcgccacgtatcgctgagccgagagccaaccaggctcggttga

SEQ ID NO: 14369 - RNA, 1101 nt, synthetic construct
  source 1..1101: mol_type = other RNA
accggcccatttcaattcaggggaaccaatgccctgttcgctacagcgttaggtctgactgccgagcagcttgaagaggccattaagctggccggcgaaagatcaagttaccagttccggacagtgcgcaaacggggaaaagaacgaacgttcatctctccacgcgcccccctacttaacttggcacagaggagggttgccgattttttgaggccctttaacgagctcctgcatccagggtgcgtgggatacgtgcctgggcgaaggactctggacgcagcaactcctcatagcggcaagccttgggtccagaaacttgacataactgacttttactcctccgcgcaggatacaatcatacacgacaccttcgtctctctgggggctactcaggaggtcagcgagactctgacctcccttgtaacatgggagggcgtcttaccgaccggcacaagaacctcccccgtggtgtcaaatctcgttctcgctgatttcgactttgaatgtgctgcagaagccgaaaggagaaatttagcatatacccgctacgcagatgatctgattttctcgggcgacgatccgttcgatatgagtggatgggttgaccaccatctgcaagcgattggatttaagctcaaccctaggaaatccgtgctgtgccgtagaggccaacccattcgcgtggctggcctaacgatctttgaaaaggacagaccccgccttcctaaagcgttgaaacggcggctgcgtcttgagatctatctcgtcagtaaggacctagccgctggacactttgagtctcctggggacgaggatgattatcctccagaagtagaggaggcccgcgctaggttcttccacgctcaggggatgctgcggtatagcgccggaatcgagcccgcctttgtgcagagcgcactcgacaagcacggtgaagagttgagagatctgctgctccccgccagacggagacatcgggacgagctggaactgcgacgcctcctcgctaagattctgggtacacgtgcaccaggtttgggccgaaccccgtctcccatcccttcagccccaccaatctcacgggtgagcagcgttgggtga

SEQ ID NO: 14370 - RNA, 1068 nt, synthetic construct
  source 1..1068: mol_type = other RNA
atgaccccacgtaccagcccagcatccaccttaagatctcccaggcatttggagttgtatctaggtgccccactctcggcactggaggccatagctgcagatctcgctgcgggcgtaggcgttgaagtggtgactctgagaagtaaaggcaaggcccgagagattacatgtccgaccgatgaaactgtgcgcaatgtccaccgacggatactctccatgatgactcctgtgcagatggaccttcccgacatggttacaggctatgtccgaggccggagttcagtgtcaaacgcccaggcccatgccggaggagcctttctgcaaaagttcgacttgcgtgacttctttcaccacatttctagtgacgcagtcgcgacagggctgagagacgtgggattccaggcggaggtcgccgcattacttgccggcctgactacatgcaggggactcctgccagccggattttccacaagcccagcaatggctaatctggcttgccgcgcattggatgaagatatcgccgccctggcggacagtctcgggttaatcgtcacgcggtacgctgacgatctaaccttcagcggggcccagttcttcgatgtgaggtcagacatcggggtaatggtgaaagcccactcacacgtgctgaacgaggaaaaaacaaggaccctgaagagggggcagcccatgtacgtcaccgggctgtctgtaagcgagaacgacagacctcggctccctcgacctttcaagcgcaagctgaggcaagagcttcattatatttctgtttttggcctagcagaacatgctgacagacacggagtgaaagttgagggtctgcgctttcgcctcggtggccagcttgcctatgccagcgctgtcgagcccgatcttgtgaagtacttcgaagctcattttcccgctgcataccgcgatgtggctcgggcacggtcccctatcagcgatgacaaaagaagaactaggctggcccagttggccgctcgtgttgctgcacggtccgatccgctggctgagatgtacgaacccaccgtgacgatcgccgcgctctga

SEQ ID NO: 14371 - RNA, 1062 nt, synthetic construct
  source 1..1062: mol_type = other RNA
atgacaccacggacctcttccgttagcattctccgcactcctcggcatcttgaagtgtacttaggggcacccctcgctgccctggagagtattgccagaaatttggatgtaggcatcggagtggaggtggtgactctccggtccaagggcaaggccagagtaattgcctgcccgacagatgaggccgttcggaacgtccacaggcgaatcctcagcctcctgactcctgtccagatggacctgccagacatggtcacaggatacgtccgtggaagatcatccgtgacgaacgccatcgtgcatgcaggcgctgcccatctgcagaagttcgatctacgagactttttcccacacatcggggtagacgctgttgacgaagggctgcacgccgcaggcttccaagaggaggtcgctaggttgctaagcaggttaacaacctgccgcgggtatctcccagcaggtttttccacgagcccggccatagcaaatctggcatgtcagtccatggacgcagaattggcggccttggctgagcaggagatgctgaatttgactaggtacgctgatgatatcgcctttagcggaatggagccattcgatgtgcttgacgaggtgcggcagatagccattgcgcacggccacgccctgaacgacgaaaaaacccgaaccctgaagcgggggcaacccatgtacgttaccgggctgtcagtcagtgagcaagaacgacctcgcctgccccgccctttcaaacgcggacttaggcaggagctttactatgtccagacacggggcctcgccgaacatgcttcatggagaggtgctaaagctgaggcggtgaggtatcgtctgggtggacagttagcctacgctagtgctgtggaacccggctgggttgaagctcttaccaccgcctttcccactgcctttcaggaagtggccaggcgcaggtcgtcacagtctgacgcgaagagaggcgagcgtctggcacaactggctgccagagtgatcgcaagaaacgatgcagcagcggaactgtatgagccttctgccacaatttcttga

SEQ ID NO: 14372 - RNA, 1077 nt, synthetic construct
  source 1..1077: mol_type = other RNA
atggagatcgaccggcgcgtaccttcattcgccgactggttgaatgaggcggatgtcgcaaatgcggtaggcatgcagctcgaaagcttagcccagacagcgagacgtttagccgaggacgagggggtggtgcactcacgtatcctgaccattagaggaaagcagcgcctggtgcatactcccagggacgaaggtgtgcgccaagctctgattgctttgatggcctccatcgaactcccgattgccaccgtcctccggagggacgaaatagcccacgggtatatcgctggaaggagtgcatactctaacgcctcctctcatgctggtgcattttggctgcagcagtttgacattaaggatttcttcccctctatctcagctacaagactggagtccgctctgttagaggctggaatgggtgcgcgcgctgcacagtttgtgactagtctgacaacctatgggggatctcttcctctcggcttcgtccccagtcccctcctgtcgaacctggttgctaccgggatcgatgtgggcctgaacgatctggcccaacaacatgggttgactgccacccgctacgccgacgacattacacttagcggcccccacgaatttgattgtaccgaggagatcgaagcaattgcccaggcctcaggattcgccctgaatcctgcaaaaaccaaagcgggcgaagccaggcacggcgcaagagttacgggtttcgtggtcagcactggctccccaaggcttccacagcacgttaaaaggcagacacgccaggatctgttttctatacaacggataggaatcgagggccaagcctccatgagagggcgaactccacagtccttggtccggaggctgctcgcacgacttgggacactacggaagtgcgagcctgttgtgtacgagaggttgaagcgggattaccctcatgcttttgtggaccttgagagctacagaaccgacgctctagcagcccgagcccgaagagcagatgccctagaacagcagctgctcctcagcagtagcccggcaccagcctattatattcccacgcacccagctggccggtga

SEQ ID NO: 14373 - RNA, 1005 nt, synthetic construct
  source 1..1005: mol_type = other RNA
atgcggttgtcagctttgcaggaaattgcacagcgcttacgagcacaccccgcagccgttcatagcagacatctcctgatcaggggcaaaaagcggctggtgcacactccccgggatgaagggctcagacaagccttagtcgccctggtcggctgtatcgagttgcctatcgccaccaccatgcgccgggacgagattgctcatggttatatccctgggcgctctgcctatacaaacgcccggtgccatgtcggagctacatgggtccaaaggctggacataaagaatttcttcccctcaattagcgccgcccacgtagaggcagcgctaacagaggccggaatgggggaagacgcagctcgcttcattgtggcttttactacgttcggcggtagtcttcccctcgggtttattccgagcccgctcctctccaaccttgtggcgactaatatcgacataggacttttgagactcgccagagaacgtggactctgcgtgacccggtacgcggatgatatcactctgtccggggaggagttatttgattgtcacgacgatgtggccaccatagtcggcgagagcggcttcgctctgaacctggcgaaaatgtctgccggaacaccaaggaatggctttagagttaccgggtatgtactctcgactggcgaccctcgactgccacgacacgtgaagagagagacgcgccaggatctgtattccgtggagcgtatcggtatcacccagcaggctaaacataggggtagaacaccacagtccttcggcaggcggctgttggcacgccttggaagcattcgacaatctgaaccacttgtgtacgagcgcatgcgatctgactttcctctggcttttgagaggctggacgccctaagggagtcagctcgggttacccgtgaacagaagtccgccatgctggaaagggaactgcttagtatgcctagtgccgcacccgcttactacacacccctgcacccagcaggcagatga

SEQ ID NO: 14374 - RNA, 1086 nt, synthetic construct
  source 1..1086: mol_type = other RNA
atgactccccccacacatctggaatactccgtcgtggattccgtaggtgtcttggctggccagttggggcggaccgctgaagacctgttccagatggcggaggagatcgcttcaaatgttaggtacgaaacgcaggccgttcggatcagaggcaaagtgcgaatactcaccgtccctgacgatcgactgaaatacctgcagagggacatttgcgaattcttaatcccggccaacgatcggctgtcgccagaggtacatggttttgcaaggggcagaagcaacagatcaaacgccatcagccacgctggacgcatttatattcagcggtttgacttaaaggacttcttcgggagcgttaccagcgcacaagtgctggccgcctttcgcgaactcggactaagtgacccagcggcacacctactcaccgaacttacgacatatcgtcgcgcccttccacagggagctcccacaagcccgatcttgagtaacctggtgatgagggaggtagatgaccgcatgagagaactggcccactcccgcagtctgtccttttcccggtacgccgatgatatggcgtttggtggcaatgagaggttcgacctgtcatcagaggtcgaggatattatcgatgcttatgggttccgcctgaatgacagcaaaaccgcatttgccgggcctggccaacctaggttcgtgaccggactctacattgatgaggaccgagtcaggctccgtaaaagttttaagcgtaagctgacacaaacactccactacgtggaaaagttcggcatcgatgaccatgcagacagggtgggaaaagcaccatccaaggcccaggaacaactccggggccgcatacactatgctagacaggtggagcctgcatggcttgataagcagagatcttctttcccccgaactcttaatgagctggttccaatgaactacgaggccactagaggggagtacctgttagctcggagacagggatttctttctggcatggccgggatgactgccgcgtctgctttgcggtatgtgcccgcagtgtcttatgccgaggtgaagagccctgttgtggtctga

SEQ ID NO: 14375 - RNA, 1665 nt, synthetic construct
  source 1..1665: mol_type = other RNA
atggaagattactggtacattgtaatcggtatggttgccctgctagtgatcttctgtctgtgcataggatttagcggcggaaagtggaactatgccgcatacataaaagaaaagaatgagcgggtccaaaggaagagatggaataaatacgttaagttcctcgaccctgtcaaggagacggaactcctgaatattatcaaactcagttcagacgccgacttcgaagccttcttgaaagagattcaacctttgctgacaaagaagtacaacccatacaacctgaacgagcagacccttcttaagaggacaatctataacgtaatcaatcgctacaccactcaatttaagtacgaccgggttaagaaaatcgaggctatacttcccatgcttaaaagagtatttcttggccctcgcctgaccaaccaggtttattctaagaaaaccctgaagcggcgttttaaattcccactaaaaagcggggtggagatccctaagttggacaccatcattgatgtggctttcttttttaacatctccgtgaacaagattctcggactgtgttacatgcaagaaaagaatccgggggcgtattacgtgaaaagggagatcatctatgatcagatgggcgagaagggaattattttacaccaaaaggaccccgctatggtgcagctggacagttcttatgccatcgcagagccgaacatcctcaaaaagaagaaatccaaccagaatgaaggcaaaaattccgaggatatccaggaaaagctggaggaaattaaacctagtttcaaagagtacagctcaccattttacaaacggaaaatgctcacaaagcccgatggaagaaagagattgattgcctgcccggtgtcttatcttaaaaagtaccagcgcaagattctgggggatatattagagaaggtggcgctgcctacaaattgcacaggcttcgtgaagaaccgatccataatttccaatgctgcgaaccacgtcggaagccagactttggtgaagatcgatctcaagaatttcttcaactcaatgaagttctaccatactttcgaagtgtttcgcggttttggctataaccgccccgtctcggggatcttggcttgcatctgtaccgattggtatacaaagggcgggagatacgtccctcaaggagcaccatctagccccatgattggaaatctgtacgcactgcatctcgataaacgcttagaaggcctctggaccaaggctggttttgtctattcccgatatgctgatgaccttgcatttagtagttccgaccccaaagtaagggtgagagggctgatatttgccagctatcagttcattaaagacgaaaaactaagcccaaatcccgccaagactaaagttttacgaaaacagcacaagaagaaagtgacgggtattactgtgaacgagaagatcaatatcgacaggaggtggatgaatgcctttcggggcgagctgcatcgttactctaagttcggtctgccatcggatggcgtccagcgtagcaaaattttctcacagctgaaggggaaaatgtcattcctgcagatgatcgaccagaacaaggcacagaaatacgacctctattttgagaagatacggaccgaatatgccaaattgctggggaattcttcccagtga

SEQ ID NO: 14376 - RNA, 1617 nt, synthetic construct
  source 1..1617: mol_type = other RNA
atggacgctttccggtactctctctatatctctgtaggttttgggctgctggttttcatctgctgtcttctgtcctcgaaaaaacgggctgactatgaggattaccgaagagaaaagtggaataagtacgtaagctttcaagacccagaactcagaaagagcctggagcacgatataatcgtgtcaacggatgaggagtttgaggcctttttggtgtcattgcgtagttctgtgaagtaccgaagggataaaaatggccttcggatacgaaagaacatctgcatgttcatcaataacatttggatgaactcctactccgagaagggtagaaaaatctataagcggttgaagaagttggaagagatcgtcccccttctcaaacgcgtgtattttgggcccaagtatacccctattatttacagagaaaggaagtacgagaagtcttaccagaggcgtaaattcaacttcccccttcagcctgatagcacagctccaaaattagacaccatcatagatgtcgcctaccatctgcagacaagcatccggctcatcctggctattatctacacccaaagtcattccagagacaggaactatgttaaaataacccagattgacaaggcattacaccagaaaggcaactcttatctgagagtggtgggcagccctattgcacggcatgtggacattgatcagagcttcattttgaaagacaagagggggaaagttcccaaaaatgcaaaaaccactgatccccaggacgcctatctcgagtacaaggaattagattcgaacttttacacacgcaaaactttggtgaagccgaatgggcggaagcggctgattgccgttcctaacgagaagcttaggtcctttcagcgcattatactcaagaccatcctagagaaggcggctctcccagacgtctgtactggcttcacgaagacaaggtccacagtgacaaatgccgaatttcatgttggcgcgcaaaccctggtgaaggtggacctgcacaattttttcaacaacctaagtcttgaccatgtgttcgaagtatttcggggattcggatacaataggcctgtttcaggaatcctcgcaaatctgtgcaccgattactatcgatcccgcaggtatctgccgcagggagccagtactagcccaatgattgccaatctgtatgctctgcacctggatagaaggttagaaggactggctaacaaatacgacctgatttattctcgatatgccgatgacctcacattctcaagcaaagatcctaagatccgtgtccgcactttcatccaggccgtgtacaagatcatcaaatcagagaaactgtaccccaattatcagaaaactaaagtgtaccgcaagcaacacaagaagagtgtgactggtataaccgtcaatgagaaggtgaatattgaccgtaagtgggtaaacgccttccgcggggaactgtacagatattctaaattcggcgtccccgaagaggaccgctttagaatagtccaccagatgcacggcaagtttgcatttctaaaaatggtcaacccagaagtcgcaaaaaagtacgagacgcaaatctccaaattcattgcggagaacagctga

SEQ ID NO: 14377 - RNA, 1575 nt, synthetic construct
  source 1..1575: mol_type = other RNA
atgctgttagagggcttgtccggcgaggcagctggcttgatcatcattgcattcatgatattcgtgttttgtctttgcctggctaagctcctcggctattcagggtatcttcacggtgattatcgttggaataagtacatcaaaagcaatgaaccctctatagagaaagagatctactacaacatacaaagcctgagcgacgagtattttaaaacctacctgcagagtatcaggaagaccatcaattacaagtttcgaactggcgacaagagcctcaaaaacactattttgaagagatccatgttgaacatcataaacaagcatacaaacgagctgccaaatgagcgtatcaagcagattgaagaaatttttcccctcctgcgccgggtgtactttggaccgggacttaacaaagaggtgtacgacaagaaacatttcaagaagaagttccacttcaagttgaaaccagagcacaccatccctcaattcaattccattattgatcttgccttgtacttcaaaatccgcgttaatgctctactgggttactcttacaaccagaaaaccaaaagaaccgcgtactacatcaagaggaagaaaatgttcgaaaactttggacaaaacacgattcctgacgactatcgttacatcaaaaaatcctactcggaactgaaggaagaaaagaagaagaagtccaagaaacagcctgagatagagatcccttcttttaaagagcttgaaagtcccttctatacccacaaatttatcgaattccctaacaaaaagcggcgactcatcagtaaccccaattactggctaaaacaacttcagctgaagattctccgggacattctggagaaagtggagataccagattactgctatggctttgttcccgggaagtcgacagtggataacgctcgcattcacttaaaggcgaacacactcattaagattgacctgctaaatttcttcccgtctctgaagttttggcatgtcctgcacgtgttcagggggatcggctataataggcccgtgtcaggagtcctggcatgcctgtgtacagactggtaccattccaagcggtttgtgccccagggagctcctacaagcccgatgatagggaacttatatgcaagcagaatggatgtgcgcattaatggtctagccaataaatatgggctcaagtatactcggtatgccgatgatttaacgttctctagtatcaacgagaagatccaggttcggaagtttattgcctcagtctaccacattatccgcgacgagaagctgtatccaaaccttaagaaaaccaaagtctttaggaagggtaataggaaagccgtaactggcattatcgtaaatgaaaagctcaatgtcgacagaaaatgggttaactcactccgcggcgagctgtatcgataccagaaattcggactgccacagggggaagaaggagatatcatctataatcagctgcaggggaaaatagcctacctgcatatggtgaacccagagaaagccaacaaattcagcctcctgtttcagaagttgagagaactgaatagaaagtga

SEQ ID NO: 14378 - RNA, 1464 nt, synthetic construct
  source 1..1464: mol_type = other RNA
atggccagcgaactgacccttatcctggtgttcgtgggcctcgtgtattttctgatatttgtttgtgcggctgctgcatctaaaaggatgagatctagatatcctaaacccaaaccagggcatcgctacaggaagcttaagagggtacgtgacccgaaaattcaggcaaaagtacgggagaggctgactaagtgggaaggggcccagtacgaagagtggtacaaagacaccattaagaagatcaactacaaatatcggacaaaccagcgccagaaaaaatggaccgttctgaaacgagcagtcctggatatcatcaacaagtatacatacgagatacctgaggagcgactcaaaaaattttcccaagacttcccactcctgcggcgcgtttatttcggtcccaaactcaataagcaagtgtacaacaagaagaatttggccagaaaattcaaattcaagatcaaggatgggaccgagattccacacctagataacattgtggatatcgccctgttctttaacacatccgtcaacgtgctgcttggctatgcgtacacgcaggacctgtcaaacaagagttactacatcaagaagaactataccaagaaacggaagagaaaagactactatgagcagaagtccagattttataaccggaccacactgatcaagccagatggcagaaaaaggctgatctccagcccaaagtacaatctaaaaaaccttcagctcaagatcctccacgatatcctcgagaaggccgaactgcctgactgctgcacaggatttaaacctggtaatagtatcgtggataatgccaaaccacacataggtaagagcaccatggtacagattgatttatacaacttcttcccgtctttgaagttcgatcatgtgtttgaagtgttccgcggctttggctatagtaggcctgtcagcggagtgctggcaggcatttgcactgatttttgtaattcccctagatttgtgccccagggagctccgacttcacccatgataagcaatttgtacgcctcacacctagataagcgcttgaaaggcttatggacaaagcgtggtttcacgtatactcgatacgctgacgacctgacattcagctctgatgccgacgatatcaaagttgggaatctgattcacgccacttacgagatcattaaagacgagaacttgaaacccaattataagaagaccaaggtgtacaggaaaggacatcgtcacgaagtcactgggatagtcgtcaatgacaagttgtcggtcaatagggactggatccgagaactgcgggccgagttacataattataacaagaatgggctgcccgacggcattgagggacagcagattctcaacaagcttcaaggaaagatttcattccttaatatggttgaccccgaaaaggcagctcggtaccgcgcgcaatttgctgtgctcaccaaggactga

SEQ ID NO: 14379 - RNA, 1050 nt, synthetic construct
  source 1..1050: mol_type = other RNA
atgcttgaaagtcaagagaaattggacctgaatatgcacgacagtaacaggtcaaaactgaagattaaagaactcccactcgtcctgaacttgcgagatctgattaactttctggagataagtcacagccttctggagaactacttcacattcaagagttccctattaatctataagaccttcttcatcgccaaaaaatccggtggccaccgggaaattttcatccctgtgcccaaacttaaatccatacagtccaagatcctggtggaaatcctcgagaaaattaacataagcaagtttgcacacggcttcatcaagaaacgttctattgtctctaacgcccaagagcatctcgagagccaggtcatctataaaattgacctcgtggacttttttccctccattaagtttgataaggtgcacgaagtgtttaagaagatcggttatagcgagtatatcagttacctcttcgggctgctgtgtactcatctgcgcggatacaatgagatgtcacaagaaaaatccagcttaaatctcaacaagttgagattcttgccacagggggctattacgtctccgatcatctctaatctggtttgctcgaagttagataaggacctaaacaaaattgctaggatatacgggttcagatatacccggtatgcggacgatatagcatttagctcacagtacagaaaggacatcacaaacaagttcaggaagaagatccattccataattaagaagcacggcttcagcattaatcgcaaaaaagagtgcctgtcttacaacaggaattttcagcgggtaactggaatcaatgttcagaattcagaacttagcttgcctcgaaaatggataaaaaatctgagatctgccctgcatcatctggaaaacgattacaatcagatcgatgaggagtgcattgagattatgaaaaatatcgaaggacgctgtgcttacgcccttatggtgaataagaagaagtacaaccactactatcaggactttatctcgatcaaaaacaacatttccaagcggtcagagtga

SEQ ID NO: 14380 - RNA, 1077 nt, synthetic construct
  source 1..1077: mol_type = other RNA
atgtttaagctgtgcctctgtggggtgatcatcatgctgaaacctctgggctcacccgcaactctcttgcggaggcgagagctgagtcacagagagcttaataggcacctaggctcccagccgggcctcatttcctcaattattgagaagggagtggccaggcactaccacaaaaaaaccatactttctggtaaccgcttcatgcgccgcagtcatgacttgcaaaaaatgagagagatactggaaccccaggatgacctcaaggagatacaacgggccatttctcgggtgcttagccgctacttcgtaccccatgagattgctcacgcttacgtcaagaacagaggaatcgtgacgaacgcaacaaggcacataggcgcacgatccatgttacacatcgatctggcagacttctttgggagtatcacccaggaggctgttttgaacggcctttaccatgtgttggaggacttttacgcgtccgacatcgagacaatcgcagagctatgctgttatgatggcttcttgccacaggggtcgcctgcttcccccattctgagcaatctggtgtgcttcccacttgacatggaattaagcgaactcgctagatcatttggctgcgctctgacccggtattcagatgatattgtctttagtacagccacacgcagcctgcctagcaagttagcgcgtgttagcgatagagaggccgcctatactgtcaaattaggtcagccgctgcgatccctatttgagctccacgggttcgaacttaatatgaagaagctgcgtttccagaggtggccaggtcctctgaaagtcactggcgttctcgtcggagaacgtctgcacgtgccaagggaattcaggcataatatcggagccgcactctctcagtggaagagacatgggattgtggtggccgcccggaatcatcccaaaggatctgccgaagcctttgcgggttctctcaaggggtgtatcgaccacgtaggacatgttgaaggcagagacagcacccattatcgacgcctgctgatcgacttggaaaccctgatcgctcgggatctgaactga

SEQ ID NO: 14381 - RNA, 1083 nt, synthetic construct
  source 1..1083: mol_type = other RNA
atgcagtacaagtccttggaacgtcggctagggctggctactggtgccgtcagcaccgtcatgaacgccgacgctgggacaaggtacaccagattccccgtctcgcctaagcgcggcattatacgaaagccaggatggactcctaagaaacgcatgattctcgcaccttcaaaagacctaaaagcgatccagagggcaatcgctcgccatatcagctcaaagttcactgctcatcctatcgcccacgcttatgagaatggccggtccattttcgcgaatgcacgacaacacgtgggggccagatccattctgaaaatcgacctggtgaacttttttgggtccatcgggcgtcaatccattattgatgcactgagactgctgcttgacgatttcggcgacagagatattgaagtgatcgcagacctgtgttgttgcgatggctaccttccccaaggctctcccgccagtccggtattgagcaacctggtctgctaccccctggacgttgagctcgatcgactggcgaggcgccacggttgcaaggtgaccaggttcagtgacgacattaccttttctacatctgcagaggtttttccaccagtgctcgcaaggacgtggcggtctggattggcccatggagtggccttggaaagacccatctgtagcctgcttcagcagagaggattcgagattaatatagggaagctgatgttccggactagaccgatgcctctcaaaataaccggtctgatcgttacagatagtctcagcgtaccacgggccttttggcacaacctgcgcgcgagtcttcacaattgggaccgccgaggcttagatacgtgtgcccggacacatgctaacggatgcgttgtcgcctttgtgaattctttacgtagctccatcgagtatatcggccaggtgcagggacgggattgcaagaggtatcagagggctctcgccgcattcgaggaattacggtcaagggataaggaacccctctcagccgctatccagagaatcgctgccgctcgcaaagccaaaaaggccaaagacgagaacgtgataattccaggcaccggttga

SEQ ID NO: 14382 - RNA, 1071 nt, synthetic construct
  source 1..1071: mol_type = other RNA
atgtttaaggccggggtcagcaacttcgatttgaagcaagtcctcggtgcaggcctagaaacagtggatgagatcattgctaacaaggaaaatcacatcgagcggatatcaatccctaagaagaacggcggaaaacggaatattatagcgcccgacccgcagctgaagtatatacagaagtctatctactggcgcgtcttccgaagatacaaagcagatccatctgcccatggcttcgtgttaaagaggggaatcgtgaccaatgcggactgtcatgttggagcaaaatgcctcggcaaaatagacatcaaggacttttttgatagcattagtatcgatcacttgaagaattgcctatttggtaacaaacatatctgcaggtactgtaaatactatgagaggatgttggatggcaggtgcaacccatcattataccacaacaagacacacaactttgactttaaatgtgaggaaatcaaggccgtgcatattcctgcttattgcgaagagacagggtacatctctctctttaatcgcattatcgagctgtgtacctttgaaggattcacggcacagggctttcccacttcccccatgcttgctaatatagtgatgcgcggattcgacaaatcgatgaaagaattctgtgcgacggaggggattgcttacaccagatatgccgatgatctggccttcagctcaaaaaaccttaccaagttcgagcttaagaagaagattaagcagaaagcctatcaactgctgtgggcatacggcttcgcccctaacaaaaaaaagactatctggaagagtagcgccggccgactcaaaatttgcggagttgtcgtgaatgtcaagaaatccgtacagcggaaggacgtacataagttccgtgctgaagtgcaccacgccaccgtgaaaaatgctgataagactacaaagggggacctgagaaaactgaaaggttgggcatcctttctgatgtccatcgacccagttaaggggaagaaatatatgaaccagctcctgaagttcgaggccgacaaattcagtattaagagcaaagggatttga

SEQ ID NO: 14383 - RNA, 918 nt, synthetic construct
  source 1..918: mol_type = other RNA
atgaatatatacgaacttctcaataccacaagcaaggaagtgtcatcgattattctggagctcgaccagcactatctgagctacccaatcgccaaaagaaatcggaaaacgatgaggtggatcgatgctcctcagggcaagttaaaggagctacaggagacgttcctgcaccgctacttatataggttttccgctcatccctcttgcgtaggttttgtcaaaggaaagagtgtgcgcaccggagcagagcgccacatagggacagagcagctccttaacatggacctcaagaacttcttctccacgatcaaaatatataaggtggcgaagttgctgacatttctgacatcaagacactcaactatcactggaaaacaggtcacctttgttaatactgatgacaaggaaaagctcgcaaggctgctgacctataagaatacccttccgcaaggcgcccctagttctcctgccatcgccaacctgtgtgcctatcagatggatgtccaactgacagcattggccaagaacaatgggtgcatttatacccgttacgctgatgacctcactttcagcaccaagaagaccaaggacaagtttaacattatcggtatgatcccccagataagggagacaattgagaaaaatatgttctccgtgaactacaagaaaacacgggtgcagaaacaaaacaatcgaatgacagtaactggagtggtcgttaacaagaaactgtctaccccaaaatggtactggcgaaacttcagagcgaaactgcataacctggaaaaaagcggcgtgcccattactgaagaagagtaccaggaaatccgggggaccgctgagtggatcaaatccttgcatccagttagaggcgagaaatttttggaaactctaggcaagcttaatttaaccatttga

SEQ ID NO: 14384 - RNA, 915 nt, synthetic construct
  source 1..915: mol_type = other RNA
atgaatatatacgatatgctagcgactgataaacagacacttaagacattgcagacagacatcgataaccagtacctctcttaccctattgccaagaagaagggaaaggcaatccgatggattgacgcacctcaacccgagctgaaaactttccaggaggcctttctgaacagctttctctacaagtttacggtacatccctgttgcgtggggttcgtacgtggcaagaacgtcgcttcaggggccaaacaacacctcggatcgaaacagctgctgaacatggacttccagaactttttcggtgctatccacattggcaaagtcagacagcttgtgaagttcctattctctcggtataagaagatcacagacaacgtcttcacctttaccagctatgacgtggaattgtttgcagcactgcttacgttcaagtccagactcccacagggggctccaacatcaccagcaatcagcaatctctgtaccttgcccctggacaaagaactggccgccctggctgctcaaagcgattgcatttacacgcggtatgcggatgacctgtccttttccactaagcaggagaaggccgtgttcgacgtgaaggatcttataaaaccggtgtctaagaagatcaccagagcccagttaactgtcaattataaaaaaacccgcgtgcagaggcctcataaccggatgaccgttaccggtgttgtggtgaatgagaaactgagtactccgaaatggtattggaggaattttcgagccaaactgcacaatttacagatgagtcaggttccagtcacccctgaagagtaccaagagattcgcggaacagctgaatggattaaaatgctccatcccatcaggggccagcaattcttaaacactataggcaagctgaatctgatgttgtga

SEQ ID NO: 14385 - RNA, 984 nt, synthetic construct
  source 1..984: mol_type = other RNA
atgtttttacccttgactaccgatgagtttctggaccgaatactggtggtgaagaatcaatggaaacggtcaactatatactaccacgccaaagtgcagcactacaagaaacacgtgagagagaagaaaccggttaagaatatcctcgtcatgggagatgccccagtccccaagctccgagaaatcaatgaaccttgtcctgctttgaagtggatccaaggatatatactcaggatggtgcttgatcctgctactgaccagctgatgaaatgcgctcacgggtgtgtgccaggcagaagcaccgtgacgaatgctgcccctcacgtcaagtctcggtggaagatccatatggaccttaaagacttcttcccgactgttacggtacagagagtttacgggttgttccataaggtgtttaagtatggccccgacctgtcttggctgctggccaacctgacacagtatgagggtaaactgccacaaggcgcgcccacctcaccagctatcgctaaccacgtcgcaacacctatggatcgtcatctcgttaaactaatttccaaaatgggaggctactacacacgctatgtagacgatcttactttttcctttcctcgccagatgagtgacaaaaacaaaaccaggttcatcaagaccgttcgcgaaattgtggagagaaatggcttcgtcgtgaacgaggataaaacaagcattattgggcggggttcgaaaatgaccgtcaccggtattgtggtaaacgcaaagaccagcacaccccgttggtttaggcgcaacattcgggccgcactacatcagagggcgttaggggtaccatctgccgacaacgaccatgtgatcgggggcaagatcgcctatgtgaatatggtgtgccccgaacaggccaatgccttccacctgaagacatgccaggtcgatgattgcaagaagtgttacggactcgcaatgaagtccaagaacgcaagttga

SEQ ID NO: 14386 - RNA, 1554 nt, synthetic construct
  source 1..1554: mol_type = other RNA
atgcctactgagaaaaagaagaaagtaaaccccctcgacgagtacacggatttcggcactatcttagtgttaagtgagcgccttgcacagtacctcagactgctgttcaagctggacaaggcttcatggaattttgccctggataaaatccgacaggggaaagcctatcgcgaatggagaaagtttaaaggacgggggaaggggtaccgctactttgctgctccgtgtgccgagctcaagacagttcagagaagcatcaaggcgcagttcctcgatcagattccgatacactttagccggtatggctgccaggggggaactggcatcgttgagcatgcggccgcccatatgggcaacaaggtagcattcggtgtcgatataatcaacgcataccccaccgtacttcgctcacgcattcggaagtgtttgcagaagccctttcggtttatgttgagacaattcggagatgtcacctggctggaggacgatgtgaaaaatatgcttgaggctgttgtggacctgctctgcctgcacgaccgtttgcctcagggccctccaacatcacctcgtattctcggcattgtgtgctacaagatggataccgccattttcagttacttacacgagtcctccagcccccttcagggcttcaacatgacatcttggtttgacgacataaccgtcagctccgataaagagattcccgaagagatgcgggccaaaattctcgccctgattaaggaacacggtttcatcccccatactaggcctgacaagaccaagtactattcacctgaaacgggggaggtgccaattgtaacagggatcgtgatatgtccagatggtcgtctgactatggctccaagaaaagttaaccagctaagggcagcttttaataactggctcaaaattgaagtctgggacgaacacatcctgggcaaggtgaatggcactttgggagcagtccgacaactgtatccagaaaagctgccaagcaaactgagggtgcttgtggggaagattgaagacaggcttcacgccgggaaggttgcaaaatctctccagtatttggacaatgcactgctaccgtcgggactgcaggatcttgcgaaacagcttagcatggtcgtcatcgacggtcaaggagacgtgagctctcaactcctgggcgacaacctactcttcgtggatggcgccgcgaggaaatcttatcaggccgggatcggagccgtgctgataaaggaccgaaccgaagtctccacaatcagtcagttgatcggaaaagcaaccagtaatcaggccgagtatcaagctatcatcgtgggtctgacagctgctaaagagctaggcatcgcggaattagattgcttcaccgattctatgctggtagtgaatcagctgaacggaaagttcgctgtgtcgaagccccatttacggacgctggtggcccaagtcaaggcattggtgaaagaaattggtaccgttaggtttcatcacgttcctagagagctcaatacatccgcccattccctggcccacatggctctgaaatga

SEQ ID NO: 14387 - RNA, 1125 nt, synthetic construct
  source 1..1125: mol_type = other RNA
atggccaagaggggcaagaggaagaacaaaaagcccttcgtgtttaaagacttcgaaactgtcttagcacttcccgagcgactggccgaattcttacgcctccttctgaagttggataaagctacctggtccttcgccctggataagatcagacaaggcgccgcataccgcgaatggagcaagagtaaaggtccaggaaaagggcggagagactttgctgctccatgtgcagaactgaaggccgtgcagcgggctatcaaacagcagatgctggatgtaatccccattcactttaccaggtacgggtgttctacgggggttggaatcaaggagaacgcagccgcacatgtcgtccccggcgtatccgtgtgtgtgaaggagttcgacattatgaatgcctttcccaccgtgttgcggtcccgcatccggaaagtcctccagaaaccattccggtttctactggaccaatttgccggtatggagtttggagatgatgatgtgaaactgatgcttgagtccatagtggatttggtttgcctgcatgacaggcttccccagggaccgcctaccagtcctaggctctttggcatcgtggcgtatcgcctggactgcgcgttgttccgtttcctccacgaaaactctacagagttccaaagctacaaaatgaccagctggtttgacgatgtgtccatttcttcgcgtgacgaaattccagaagaggttggggtgaaggccgcaaaaataatagaagagcatgggttcactgcccaccaccgaaaagacaagtctaaatactattcacctgctacgggaactgttccagttattacaggcctcgtcctatgcgcggatggccacctcacaatgactccgaacaaggtgaatcagttaagagcagccctgcataaatggagcggagagaagagttgggacgaggccaccctggggcagatcaatggcacactcggttgcattaaacaggtatatggcgataagcctcctagcaaactgagaaagtcagtgcgagagattgaagctaggctggctatgatgaagatcgagaagctgcaggctgacgtcgctcgcgccagagtcatgcctaagaagaagtcaaagaagaaatga

SEQ ID NO: 14388 - RNA, 1365 nt, synthetic construct
  source 1..1365: mol_type = other RNA
atgatgggcaccagtaggttcatggtgtctctgccctgtataatggcttctagcttcaaacgcgagatgggcaagatggcgaagaccaagcgccgaaaaaagcggaagagggcagaatggacatgggtcgactttcgggtgatccttgatctgcccgagaggttaagtagatatctgcgtgaactcctgcatttggataagccttcctgggactttgcgctcgaaaggatccggcgctacaaacaatggcagaatgaaaaaaaggagaagccagatctcggtcgtcttccccgaactcaagtagcttactttgaatggtcgaaaagtaaaggaaggggcaaagggcggagatatttcgctgcaccatgcgcggagctgaagctggtgcagaaagcagtgctgaataggctcctggcgtccatcccagtccacttctgtagacatggcaatcagcctggatcctcgattctgagcaacgccgcccgccatatgggcttcgccaaaagcgtgttttccatagacattgtaaatgcctttccgacagttttcaggagcagggtcttcgccaacttgaaaaagcccttcaagtttgtgttgagacagttcgccggagtggaattttctgaagacgacatcaagcagatgctagaggttctttgtgatctgatctgcctacacgaccgactcccacagggtccaccgacctcaccccgtattctggatattgtctgtgcaaaaatggatcaggagttgtacgctctccttgagaagaattccacccctttccaatcctatagaatcactgcttgggccgatgatattaccatctcttgcgacggggagatacccgaggagttgagagaacagtgccttaaggttattaaagacaacgggtttatcccgcacacccgggaggataaaacaaagtactacagccccgagactggagaggttccagtagtcactggcctggtgctgacctctgacgggcggatgacgatggcccctcgcaaggtgaaccaatttcgggccacactccaccaagccctaaagcgaagtgagtgggacgcacagatcagaggtcagattgctggtacgatggggtacatcagacagatatatcctgacaaactgcctagcgcactgcgcgaattagtgcctcagacagaggctcggatgcaggaagagtgcaagaaggcattacagctgaacggagaggccactcctactgtgcccccaaactcactgcctaaaaaaaagggcaaggccaagactaaacccgctaagacaccaaaatcccgcacctcagatgaggccgaagaatcttcagctaccgagacagtcctctgtgaaatgcagagctga

SEQ ID NO: 14389 - RNA, 1314 nt, synthetic construct
  source 1..1314: mol_type = other RNA
atggcgaagaaagccaagaagcccagagggaccgctccagaagaacaaaaaaaaagaagaagacgacggaaagaatggacctttacgaactttcagaacgtgcttgccttgcccgagaggctggccacctacttgaggctgctgctgcatctggacaagacatcctgggacttttgcctggataaactcaggcagcatgtaaaatgggaagcggaggttgaggacaagcgacctaaagtccaaatcaatgtgaaaggcagagaacgcacctcaagatccggacccgcttatctggcatggtctaagtccaaagggcgcggcaaaggccggcggtattttgcagccccctgtgatgaactggggagagtacagaaatctatactgcacaggtttatttctcaagtcttcgtgcacttcgccaggtatggcggacaggtgggcagcagcattatggccaacgccggacaccatgctggtttcgccaagtcggtgtttagtctagatatagtcaatgcatacccaaccgtgtatcggtcccgtgtgcgcgctactctgcggaagccgtttgagtttgctctacggcaattcaagggagtcacattcagtgaggaagatgtgttgaaaatgctcgactccatcaccgatcttatcgtcttcaaggaccgcttaccccaggggccaccaacatccccccgtgtttttgacattgtgtgcggtaaaatggatcaggagatttttcagtggctggagtctaatgccacgcccttccagggataccgctacagtgcatggaccgacaatctgaccataagttcagatggagaaatcccactcgaggttcgacagaaggtgattgaaatcgtccgcgagaatggcttcttcccgcacatgcgagaagataagatgaagtacttcagcccagagacaggcgagcgccccatagtgactgggctcgtggtgttacctgacggcaggattactatggcacctcggaaagtgaaccagcttagagctaggcttcaccagttgatgcttcgtaaagcgtgggacaaggaggctatgatgctcatcgacgggacaatcggtttcgtgagggagatttaccctaagaacctgcctagcaagctccgagacgtggttttagccgtagaggcacggagagcttcaatgagggtcccagtagtgcatgatgagagcatcgaggatgaggatgccatcatgctcgatgaagaccctgaaacaaaggttccgtctcctagcaagaagaaggacgagggtcctactgagactgtctcagaagttgtcctgatgtga

SEQ ID NO: 14390 - RNA, 1311 nt, synthetic construct
  source 1..1311: mol_type = other RNA
atggctgagaagccagaaaagcgtcgccagaggagacggaaggagtggaaatacgataactttgccgcagtgctggccttgccagaaaggctcgcccatttcctccggctatggctgcacttagacaagagcacttgggacttttgtttggataaactcagacagcatagagcatgggacgagcaggtggcccagtttagggctcaagaggggaagaagagaaagaagggggaggccgaggtgccaaaacctccgaggtgtggccccgcttacctggaatggtccaaatcgaaagggcgggggaaaggtaggagatactttgccgcgccctgtgaggaactgaaggtggtacagaaagccattaacaatcgcattctggcacacatcacggtgcactttgctcggcatggcggccaaataggctcaagcattcttacaaatgccggacatcacgctggttttgcgaaaaccgtgtttagcctagatatagtgaatgctttccctagcgtatacaggtccagggttaaagcggtcctgggcaagcccatcagattcggattgcagcagttcgcgggtgtggccttctcaccagaggatgaggaagccatatgcgcaagtatcgcggacctcctggtcttcaaggaacgcttgccccaagggcctcctacctcacctagagtctttgacatttgctgcggtaaactggaccaggagatcttcgctctgctgcagggacactccaccccattccaatcttatcgatataccgcatggacagacaatctgaccttctcatctgatggcgagattcctgaacccgtgcgggagcagctggtagaactggttcgcaaaaacgggttcttccctcacacacgaccggataagatgcgttactattcccgcgaaactggagaggttcccattgtgacaggtttagtcctgggcgccgaaggaatgctgaccatggccccgcgaaaggttaaccagcttcgggcaaggctccatcgctttgagcgcctcgccaactgggacgatcagatccaaggagaggtggcagggactcttggctacatccgacaggtctatccaaagcgtttaccaagtaaacttcgggatgtcgtagctgccatcgacagcagattggcagccaataaggctgtgacgactgaggtggccactgctccaacacctgcaccctctacccggcctaagacaagtaaggcccccggaaaaagcaagggcaaagctcgagctaaatccgcaggcaagcccaaggtcaaggaggaacttctcgccgaagcagtttcttga

SEQ ID NO: 14391 - RNA, 1239 nt, synthetic construct
  source 1..1239: mol_type = other RNA
atggcaaaagggaagaaggtaaagaaacagaaacttcaaaagaccgacgtgaaagacttcgaggccatcctccaaattcctgaacgtctcgcacagctgctgcgcttactctttcatttgagcaaacctgagtgggatttctgcgttgccaagatcagacagaaggaagcgtatagagaatggagagagagcaaagggcctggaaagggtttccgacagttcggcgcgccgtgtgctgagctgaagctggtgcagaagcggatcctgcagaacttcctggctaacgtcacagcccactttattcgtcacggtaatcagccaggttcctccatgatgaccaacgtgcaacaccatgccggattcgccaaggccgtgtttggcatagacctggtgaacgcattcccctctgtatttcgctctaggattcgggggaacctcagagtgccactggagaggaaaatttctgagtttggcgaagaagtgaataaatccctctccgatgaggataagaagattatgcttgaggccgttgtagatttcttgtgtttacatgataggctgccacaaggccctcccacgtcacctcgagtcctagatatcgtttgctttgcccttgaccggtcgttggccggaattgccgctaaacacagcaccccctttcagcagtatcggctgacagcgtacgccgacaatttcactctcagttccaatgacgaaatccctgaggaagttaagactgaggttctagaagaaataaagaagcacggctttatcgcacacacccgaccagataaaactgaatactactcaccttttacgggaaaagtcccagtggtgaccggcatagtgcttcccacaaccgccgacgggcatatgaccatggcaccacgcaaagtcaatcaactgcgcgcacgcttacatcagtacgctgagaaatcaacatgcacagatgaggaacggggtgtggtgatgggcactatcggatatattaggcaggtctaccccaagaaggtgccaagcaaactgcgagctctggtggagcagattgagacgagggccagaatagagagattgcctgctcctgctgtcccgatcgaagctgttccgaagaaggtaggaacagacatcgatctttctgtcatccccagtgctgacaccgcaaaacccaaaaggaaaaagccaactcccaagaaaagtaagctcactaaggactattgtggggagagcctgcccttctga

SEQ ID NO: 14392 - RNA, 1281 nt, synthetic construct
  source 1..1281: mol_type = other RNA
atgaaaatcgctaaactctgcaggtggctgtggctcgtgaatgggttacaactcaacaagaagcgaaggccaggagtagctaagaaaggaaagaataagcggggcaaaaggcagaaaatagtgggcgacgacttcagggtagtcctggacgtgcctgagcggcttgtgctgttgctgctccagtttctgcacctaactagagcgaactggtccttcttgatggatcgcatccgccagtacaaaactgatgggaccccagtctacaccgagtggtctaagagtaaagggcggaacaagggccggagatatttcgctgccccttgcgacgaactgaagctggtgcaaaaggccattttaaatcggttcctgctttccgtcccggttcatttcatccggcacggtggccagcgaggttcctcgatcctcactaacgctgagacgcatgcaggctttgctaagtccatgttcgtcgtggatataattaatgcctttcccacggtattccgatcacgcattaaggctaatctacgcagggcatggttagaccactgtcgaatgtttgagggagtcgagttgtctgaagcggacaaggagatgatgctcgaggccattgttgacctagtcgcctggagagacagactcccacagggacctcccaccagccctcgtgtgctggacatagtctgcctgcgcatggatgagcagctgtatgaactgttctatagtcattctaccccctttcaatcgtaccggtccacagcctatgtggatgatctgactttcagctgtaatgcagattcaatccccgaagagttgagaagtgaagccctggaaatcgttagacagaacgggtttttaccacacacaagggaagacaaaacagtctactatagcccagagactggaagagttcccgtggcacttggcctggtgatcggtcgggacgggcgaatcaccatggcaccttacaaagtgaaccagcttcgctctaggatttacacccttttgaccaaaaagggcgagctggatgatgtaagtcgtggtcaactccagggcaccattggctttattcgtcaggtgtaccccagaaagcttcccgccaagctccgccagatcgtggaacaggcggagtggaggctgtctgccgaaaaatcaggggccacggttacaatagttgtggaggcactgccagagctggagactcctacaagcgaaagcagctccgaaggagtgacatctagcccgacacaagtgaaagaggctatggaattgtcagcctga

SEQ ID NO: 14393 - RNA, 1224 nt, synthetic construct
  source 1..1224: mol_type = other RNA
atggccaaaaagggtaagaaccggagagggaagaggcagaaaatcgttggcaatgacttcagagtcgtgctggatctgcccgagcgtttggtcctcctgctgcttcaattccttcacgtgtcacgagctgactggacctttctcatggaccgcatacgacaacataaaaccgacggtacgccgatatacacagaatggtcagagtccaagggacggggtcgcggtaggaggtatttcgcagcaccttgtgaagaactgaaactggtgcagagagcaatcttgcaccgcttcctgtctactgtgcaggtgcactttgtgcgccatggcaaccaaccgggaagcagtatcctcacaagcgctgagacacatgccggggcaaaaagtatgtttgccgttgacatcgtgaacgccttcccatcagtcttccggtcacgcattgaagcaaatctgaaagggccctgggaacacgcctgcaggatgttccagggcgtggaactgtccgaggctgacaaggagatgatgctggagacaattgtggacttagtagcgtggcgagatagattaccccaaggaccacctacctccccgcgcatcctggatatcgtgtgtttgaggatggataaacagctgtacgagctctttatttctaatgggaccgtgcagagttatcgttctacggcttatgtggacgaccttacctttagctgcaatacagacagcatacctgaggagttgagagaaaaggccctggaaattatccggaagaacggctttattccccacaagcgtgccgataagactgtttattacagcccagaaaccgggcgagtgccaatagttttaggactggtcatctgccatggcgggaggattactatgacgccccggaaagtcaaccagctacgggccaggttacacactctcttgacaaaggagggagaacttgacgatgtatcgagaggccagctccaaggcacaatcggattcattagacaggtgtacccaaagaaactccccgctaagctgtgtcagattgttgagcaggtcgaaaggcggctaaccgctgagaagagcggcgccaccgttactatcgtaatcgaggcacttcctgagctggaaacttctaatgccgatcccgagctcaaagatgccgctgtgcctcagcaggatgtcggcgagtccatggtcagtccagcttccgtacaggaggtggcggcgccttga

SEQ ID NO: 14394 - RNA, 1245 nt, synthetic construct
  source 1..1245: mol_type = other RNA
atggcaacctcaactcggaggcggcgaaggcacacacctaaggagtgggtgtataaagatttcgagtccgtgttggagttacccgagcgcctggcacgaattctgagactgctactgcacctctccacccaggagtgggacttttgtcttgacaaactgaggcagaaggccgcttacagggaatgggccgaaagcaaagggccaggtcgtggcgttcgacgatacgcagctccctgtgatgaactgaagagcgtccaacggaaaatcttgaatcgctttctcatctccattcccgtgcatttctgcagacatggaaatcaaagagggtgttcagtgaaaacaaacgctgagcatcatgctggaaacgaaagagcgttcagcattgacatagtcaatgccttcccatccgtgtatagatcacgcatacgggccaatctgcgtaaacccttcacctttgctctcaaacagtttagcggtcaaacatttgaggccgaggagattaaacagatgctggaatccctggtagatcttgtctgccttcacgataggttgccacagggacctcccacgtcgccgagaatcctcgacatcgtgtgctgcaagatggaccaggacatttggaaattaatctctgagaacagtaccccgttacaggagtacaggataactgtctggtgtgacgatttgacaatcagttttgaagaagaaatccctggtgagcttcggaagaggatactcgcagttatgaagaagaatggctttttcccccacgagcggaaagataagaccaagtacttcacccctaaaaccggcgccgtgccggttatcacaggaatcgttctggcacccgatggcaggatcaccctagccccaaataaactcaaccagttccgcgcgaggatcaacaagctgctcgccgtgattaaagcagaacctaccaagcaagtctatggcgaaatagctgggacgattgggtatctgcgtcacatttactctgacaagttgccaagcaaggtacgggctattacagagaaggcggagactgagctgaagaccatcaagttcaacgaacttgcaggggaactgggcaagaaaccacggcgacgcaaaaagacgactgccgtgactcccgagccacagacttcagaaacttctgccgagacacagattgccaccgaggaaccacctcgcagacgcagtagaaagaaaaaggacacagctgatgagtctatcccttttaagtga

SEQ ID NO: 14395 - RNA, 1371 nt, synthetic construct
  source 1..1371: mol_type = other RNA
atgcctcgcaaaaagacacggaaaaagtctaggaacattgcacgcggcaataacttcgtgaccgttctatccatgaacgatgatcgccttgccaagaccatccgccagattatcagttttcaaaaaggagactgggatctactaatggacgtactgcagaattcctttgtgtatcgagtggagcgaatctctaaaggcatcgggaagcctcccagaattgtacacgctcctaacggcctcctgaagaaggttcagagaaagatcctcaaccggtttctgagtgaaatccccactcactctgctaggcatggtggcggacaaaaaggcacctcaaataagactaatgcgttagaacaccaagacaacgcctatgcattctccacggacatcatgaatgccttcccgagtattctgaggtctagggtcagggcttgcctcaaaccacacttgaagcgagtgctctaccagtttcggcctctcgtctttgagtttgaggagaagcgtgacccacgggagaaaccgacttgtgatggggatattgtcctcgaggggttgattgacctgctggtgttcgatgacagacttccacagggacctccctcctcaccaagactgttggatatcgtgtcgtataaaatggactgcgatctttggcgccttgcccaggagtccagcaacttaggtgacgagtacgtctatacagcttacgtggatgacctgagcttcagcagtgcagttcccatacccgaagaagtacagcagaagatgttgaccatagtgcgggacaacgggttccacccccaccacagccccgagaaaactaagtaccatggccctgataccggcagccatccagtgataacaggcatcctgattagagatggtatgatgcacctgcctactcggaaacagaatcagttgagagcacgtctgcacaaccttaatgtggctaaggaagcctggagcgacaacgagcgtggtgaggcagctggactcttagggtttatccgccaaatataccccctggattcccataggaaactgccgtctaagctcaaagaccaggttctgttctcagaaaatcgactgcagcagagaaaggtcgtggtaagcgaaacaccattcggcattccagtggccgaggaagacgtcataacaaaggtgtgtcagaataacccatcaatcagcgattttaatgcgctggccgtctcaacgagagttggatggacttcccatagtggaatccccttcacggggaccattaccgaacggttccctgacaagcctcatctggcccaggttacctacctttctaaggggggcaaaaggtgtggaacacgcctgaaatgccaaaggttggccgtgctctga

SEQ ID NO: 14396 - RNA, 1263 nt, synthetic construct
  source 1..1263: mol_type = other RNA
atggccaaaaggaaacgcggtggagccgctagtgcgggagatgctcccactgcaactctggtggcggacgacgatgtggcccagaccttccagaaaatcttcgctgccttgagtgaaccggctatgacatttctttcgcaatggctgggcatccctcgcaacgccacagatcgaggcgttggattggcccgaccatatacattggcagatgcggctgctatcctcgagaacggtactccatataggcgctactttagacccaaatccgggggaggcgtgcggcgtataagcgaacctgctgcttcagtgaagcatgtgcaacgacgtctgctgcacgtggtcttcccgagcatcccggtacaccatgctagctttgccgggctgaggacccggtctgccattgaggcaatagagtggcacgctgcccaggggaagccttttttcaaagtcgacctaaagaacgcataccccagcgtgtcccggaccaggctgaccaaggtgctacggggccccttgcaggagtatcttgctcgcgccgccccccatcttgtcgcagaagagtacgaggccctcatcaattttgtcatttccatttgcctcgatgcgggcggattagcacagggtgccccaacatctctccacctgatgaatgcagcaagattcgaactggactgtgccctcgccgcctatctcaggagtctgccagggagctacacgtacacagcctacgtcgatgacttaattatctctagaggggacgccacggagattcccgagtacgtccgagagagaattgttcggatcgtgcttgcccatggtttcctggtaaatcgctccagacgcaaaagaaaggtggactattggcctgctggaactggagcaaggaggccagttgtgctggggctagttccacaccgggacggtagggttaccatttccgcaaagaaccgaaagcgcttcagggctgccctgcaccacgcactgtcttcccctgaaagctcagatgcgcacagagcccaagtagccggcgtgatgggctacctgcatatggtatatggcgacgaccgcttaccaagtgagttgcgggtgctgtacgctcagtgtagagaaagatttgggcggccaaagactcctgggggcgcttatcctgacatcgattgcctccttgccgagcagcaccccggagaaggcaaagcagcagacccccattcagaagtcgatgatgcgcgtgcctcaggcaagccccctaccgattctgcttga

SEQ ID NO: 14397 - RNA, 1212 nt, synthetic construct
  source 1..1212: mol_type = other RNA
atggctgagcagagcaggttaccaatctctttcctcctggatgccaggctggaggaggtgctatgtcaaatactgaaaattgatcccgccgaatggagagcaaccaccgccctctgggcctctggcaatgcgtggacgatccacaaaataccgaaaaagaaggggcacagaaccattcatgcacccagcgacccactgaagaaggttcttcgggcgctccttactcagtttatccaaggcattcctgtccatctcgctgttcatggggctcaccccgggacatccattgtgaccaatgcccgcgctcatgttggaggaaaagcattctacctgctggacctgaaggacgcattccctaccgtgaacagaaaacgttgctcagcgatattcggacccactttcactggctatatcacagtcgttacgggcttgccagaacaggacggtaagaggcttgctgagacatttgttgatcttttgatcgtagacgacgttctgccgcagggctttcctacttcacctgctgtcttgaacgtgctcctaggccaggtcgacaggaacatatcgcagctcctgcgatcagcatctgccacagagggggtggtgtacaaatacactcggtttgtggatgacttaacaatttcatcctccgacgaggtgatccccaagaagctgagacagaaaatcagacaggcggtccgaagcgatggatggactattcagggtaccaaagtcagttattttggggacggggccgaaggtgacgaggaaagaaccaccaagtatccagaagtaacaggaattatccccaaccaggatggtcggctgacgattccacggccacgactcaataagttccgcgccatcctccacaatctactggaggtagccgataaacgccagagtggagatgaggaggcactgaaggcagtgaaagcccaaatggagaaagatgtggtggcctttcggaagcgcgggatcagtttggacagcaacttgagccctgacaaattctatgctagggagtggcccctgaccacaagggaacaccgccttttagtgggcatcgtgggcttcgtgagcatggtatacgatcaaaagctgccttctagtattcgtgaactgtacatcaaggccaagactcagtttcggattggcacccgtgatatctcccaaggacacgcttactccttcgtcaaggaaacagaatga

SEQ ID NO: 14398 - RNA, 1194 nt, synthetic construct
  source 1..1194: mol_type = other RNA
atgccaagttcttttttactcgatgctagcctagaagagactctgtgccgtgtgctgaagatcgatcctgccgagtggagagccacaaaagctctctgggagagtggcacggcatggacaatccatcacatccccaagaaaaatggtgtgcgaataatacacgccccgtcggaccctctgaagctggtcctaaggtccgttctgaaactgtttctgcagtgtattcctgtgcatatggctgtccatggagcccatccagggacatctatcgtgacaaacgcacgcgcgcatgtgggggataaggccttctacttcctcgacctcaaggatgcgttcccttctaccaatcgaaagcgttgtgcttctgtcctgggacctcgccttgccacacaccttgcagatgcaaccgatttatcagaaaaagattccaagcgccttgccgagactttaattgaccttctaatcgttgacgacgttttgccacagggctttcccacttcccccgctgttctcaatgtcgtgctcggagcagtggacagagtgctctcacagctcctgagggccgagagcgagaaggaaggcgtagtgtaccgatacactaggttcgtggacgatttgacaatttcaaccgatgctccagagattagcaagaagttgaggcaaagcattaggcgggcaataacccacgatggctggaccattcaggggacgaaggtgcactatttcggggatgcggaagagggggacgaggaacgcaccacgagaaaccctgaagtcaccggaatcatacccaatcccgatggtcggctgaccatcccaaggccaagacttaataagtttagagcaatcctccacgacttgctgactgccagcacacaacgccttgaaggtgacgccgaggccttgggcaaactgcaggctcagtttgacctgttccgggagctgtgcaaaaaacgcaaggtctggatccagccgaacttgaccttacaggagtggtgtggcaacgactggccgctgtcccctcgtgaacggcaaattatcgtcggcattgtgggattcgtaggtatggtatacgaccagcaactgcccagtattatcagaaaaccctataacgaagccaaagttcggtttggcatcggcctgcgggacatggctggaatcaatgggtataacctggacactgagatttgctga

SEQ ID NO: 14399 - RNA, 1026 nt, synthetic construct
  source 1..1026: mol_type = other RNA
atgtgtgtgaattcttcaacagcggcccggtttgctcagcaagaagtatttatgacagacccttctgcggctcctgcatccttccacaaactgacgcccatgattgaacgcactttcgtcgagttgattagggaaactgaggccgtctggagttggtgccaccagctgtataccgatggggtaccttgggaaatgagacggatcccaaagaaaaagggatttcgcactattcatgccccaaaggatcctctcatggccattagcagagggatattgcatcatgtgctcagacgcctcccagtgcatagatccgtgcacgggtccgagccaaggtccagtgtgatcaccaatgcacgagtccacgctggcttcgcaaaatctgtctacaacttagacctggagaacgcctttcccagcaccaatcgtaagcgtctggttgcaaacctgagcccgaaaatgctggctcttctgctggactcgaccgatctttccgaggaggaggcatcagtgcttgtggagttgttaatcgatctgatgctggtagacgacatcttgccccaaggcttcccaacaagcccagctgtgctgaatattgtattgctcccggtggacagggagattagccggtacctccgacaggtcggtgaagaactaggttgcgagctgcggtatacccggtacgttgacgatatcaccatcagcagtgatggcgacagaatccccaaacccgtcaggaatcagatacgcaagatcatccgtcacaacggatggaagattaaccagacaaagctgatgtaccacggggatgccgagcctggagatgacgaacgctctactaaaatgcctatggttacaggcctagtgatacatgacgatggacggctgacggtcccccgatggaagttaagaaagtggagggccctgatgcacgagctccttcaggccgaagatgtgtcacaagaccagagggataccctagtgggtgttgtgtcattccttactatggtttatgacggcgacctctga

SEQ ID NO: 14400 - RNA, 1188 nt, synthetic construct
  source 1..1188: mol_type = other RNA
atggccttgaagataacctgcccccagtgtactgcagaatttttcgttgtggaggccttcagcggtagtaagattgtgtgcccccagtgcacatccgctattattctagcattaaaaactcagcatccttcgacacatatctctggtcctaaagcgatcctgccttctcagatgctgaacattaaggaggaggcaatccgtcacttagagatctggctggacgttccgtctgtttctatcaagaatgccctgtcgatgatagaacaagataaagcttacgaggtgtggaagattcccaaaggcgaaagcaacacgttccgagaaatcgcggctccagccgacgtcctgaagcacatacagcgacggattctggacagactcctgtatcggatcccagtcagtaacgcctcccacggcttcattcagggtaggtccatcgtcaccaatgccagcttccacctcaagacagccggggcagtgctgaattttgatctaaaggatgctttcccctcagtagatgcccagcgcatcaagcatttgcttgtacggtacctgaagattcccctcaagcacttggggggaaatattccccacgaagccctggaccaagccattgagatgctggtcaaatttaccacctataaaggagctctccctcaagggggcccagcctcaggatatctgcttaacatagcatgtatttccctggataaaactatctactcacttctccagtcttatggcaattcctaccgctacaccagatacgctgacgatatcaccatctcaagcccaatgccctttccccagggccttcaggaggccattgagacagcgattcataacagtggtttccagatcaatcctaagaaggtcaggtacgctgtgaggtcccaaggccagagactcgaggtgactgggttgatcctggaaaaagacaaagtgcgtattccgagccagaaaatcgaaatcttccgggcaattatccaccaagctgggagtcttgagacgcagaacctccaacctgagaaaagattggagatacagagcatcattgcctttatcaaaatggtgtatggcaagatcccataccgcatatggggaccatacaaggcttacatggaaaagcatggaatatttatgcctaggaaaacatctaaggcatatctgagcttatatccacactga

SEQ ID NO: 14401 - RNA, 1212 nt, synthetic construct
  source 1..1212: mol_type = other RNA
atggcggttgaaatccgctgcccggaatgtggcgcagccttccaggcagaggatgtatttcccggcagtcgagtgagttgtcctagctgcgaggcgattctcattctggacgttgagaaacaacggctgtccagaaaatctattgtgccaccagtgcccgggcccaaaatatacaagccagaggaccaggattctctcaaacgggctgcgattaatcatctgagcaattggctggatattccagccacacagataaatgaggctctcgcatcacttcagaaaggagagggttacaacgactggaagatccccaagggtaacgaatattccttcagagagattagcgcccccattcaaatcctcaaagacatccagcggcgggtgctggatagattgctgtacaggattccagtgtcaaacgccgcacatggctttattaacggaagaagcatcgtgaccaacgcttcttatcatcttgagacagctcagtccatcctgaatattgatttaaaggatgctttccctagcgtgaagaaggaaagggttaaacacttgttcgtccgctatatcaaaatccctctgaaacacctgggtgagcagatcgatcatggcgttctaaataaagtagtggacatcctggtagaattgaccacgcacaatgggggcttgcctcaaggaggaccctgctccggatatctgttgaatgtcgcctgtatcaccctggataaaagcatctataggctgttacagactcacagtactcaatacatccagtaccgctatacacgttacgccgacgacatcacaatatccgccaatgccccaatctccaatatgctgaaatcggagattcagaaggctatactcaataacggctatcagattaaccctaagaagatacactacgcagaacgaaagagggggcagaagcttgaggtcacggggcttatcatcgaaaagaacaaagtccggatccccgcatcaaggctggacaactttagagccaacattcaccaggcctctctcatgaacaccgctgacctcacccctgaaaagaagctagaggtccagtcaataattgcctttgctaagatggtgtacggaaaggtgccacaccgtctctggggcccgtacaacacttatctagaaaagcatgggcttactcaccctttcgggcgcaagggcttacaatgggaccagtacccctcttga

SEQ ID NO: 14402 - RNA, 1197 nt, synthetic construct
  source 1..1197: mol_type = other RNA
atgtcgattaaggtacagtgccctcagtgtaatagtgggtggaacgtgacagaagctttccccggctctatggttcactgcgccaattgtggctgcgcagtgctgctcgccatcactccaacctatacatcccagagattccttactccagcacctcaagtgaccgggccttcacagcaggaagtcctcaaagagcaggccgtggggcacttagaggcctggctggacgtgtctgcggaacagatacaacaagcactggaaagcattcgtctggggacagcttacgacatatggaaaatccccaaaggcgatagcggcttctttagggagataacctccccttgcgatgtgctgaagatgattcagagacgcatccttgatcggttactgtaccgaatcccgtccagcaatgcagcgcatggttttattccctccaggtctatcgtgaccaatgcatcctatcaccttaaaacagccggagcggtacttaatctggatatcaaggatgcatttccaagtattacatcgcagcgggtgaagcatttgtacgtgaggtatttgaagatgccgctacaacaccttggggtggctgtcccacatgccgtgttggactatgctatcgccttattggttgagctgaccacctacaacaaccaactcccgcagggcggtccctgttcaggatacctgctgaacctcgcctgtctgcgtctggacaaagagatttttcgactgctctccacatacggcgcctcttacaagtacacgcgctacgctgacgatattaccattagcgccccaatgccctttccagaggatctcagcagcaatctaatgaaagtcatcctgcacgccggatttcaggtcaataacaagaaagtccactatgctatccgggataagggacagcggttggaagtcacgggactcatcttggagaaaaataaggttaggatccccaacgaaaagctggagaagttcagaactattatctaccaagctagtctactcgacactgagaacctcacttgcgaaaaaagactggagatccagtctattatcgctttcgtgaagatggtttatgactcagtacctttccgcctctggaagccctaccagatatatctggacaagcataacatacctctgtcaaaaggtagtcagcacctgagccttgacttatatcctcattattga

SEQ ID NO: 14403 - RNA, 1290 nt, synthetic construct
  source 1..1290: mol_type = other RNA
atggccactaccgtcaattgccctgggtgcgccagggagatttcaatcggccgcgcttttactggagagaggcttgagtgccccgactgccagacgatactgctgctgaaagtgaccgctgctccgagtctggacagaccgcagacaatattaccgcctccgccacgcttcgctcatccacctgccccaaaagatgaggcggagatagatcgcctcgccagagctcatttagcaagctggcttgatctgtctgctcgcgaactgggcgctgccctgtctctcgtcgagaatggccagggctacgacacctggcagattcccaaggccggcccatccttcagaacaataagcgcgcccaaggaagaactgaaacgggtgcagcgtaggattctggatagaatcctgtataggattcccgtatcgaacgcctcccacggatttgttcctgggcgttccatcgttacaggcgcccgggtgcacctggaggatgcaaaggaggtgtataatttggacctgaaggatgcctttcccagcgtcgacgccacacgagtgaagcatgtgtttgttcggtgggccaaaatccccttgaaacaccttggtccacatgttgaacacgccgtggtcgaccgagtagttgaactcctggtaagattggtcacccacgagggcaaactaccccagggtgggcctacgtctggctgtcttctgaacttggcttgtctgaagctggacaagtacgtctacagattcctcgggcggtatcccggggatttgcggtttacaaggtacgcagacgacctgactgtaagctcacgcgacaccatccccgaggaggtgcgacagggtctacaggccgtgattcgggactgtgggttcagagtgaacccccagaagatcaggtatctgagtaaggctaggaatcaaaacctggaagtgaccggtcttatcctagaaaaaggccaagtgaggatcccacccgcaactctcgatcgttaccgcgctattctccaccaagccgcgactgcccatgagttacccgatgaaaagcgcctcgaggtgcaatccatcttagcgttcgtgaagatggtttaccccgcactcccaggggctattcggaaaccctttgaggcttacgcagccaaacacgtcggacggcctccaggacctcgaaaggcattcggactcgatctttatcgaggcgcaagaccacctgctcccgaaccagcagcgcctgaaccaggagccttgcctgccccagcaccagaacctcctgcaccgcctaccggatga

SEQ ID NO: 14404 - RNA, 1263 nt, synthetic construct
  source 1..1263: mol_type = other RNA
atggaacgctcaagtatggagtttgaaatccattgcccatcctgccagaaggagtacctcgtataccatccttttactggagccatcctcccgtgtcaaagctgtggaacaaacatcgtcctagccattccgaaggaattggagaaagaaggcgatctgaagcagttcaggtatacaatcaaacgaggaaggaagagagaaaagccacacacaccacaccttgtgtcacccgaaaaacagttgttactgagggaagaggcgctcttcgctctgagccggtggctggaccttgacaagagtaccctagaggaggccctggacctattaaaggaagggaagggctacaacgagttcagcattagcaaggggcccggccgtgggtacagaaaaatcagcgcaccctccccagtcctgaagaaagtgcagagacagatattggataggctgttataccgaattcctgtcagtaatgcttgtcatggcttcatgcctcggcggtcgatcgtgaccaacgccaagttccacctgccaaccgccaaggtagtgtacaatgtggacctgaaagatgcattcccttcagttagcagcctccgagtgaaacacctccttgttcggtacattaagattcctctcaaacacctgggtgagcaaattgaacatgagacgcttgatgagataatccatctccttgttcagtttttgacctaccagaacagtctcccgcaaggttctccagcttccggctatctgctgaatatcgcatgcataaagctggacaaatacctgtataaactccttcgggaggagggcctggcaaaggaaattaggtatacacgctacgctgacgatctgacattttcatcacaggactctatccctgagactttgcgcagaaagattatctccacaattcgtgactgcggattccaggccaatacctccaaaaccaagtatctggaccgtggaaaaaaccaagtcctcgaaatcactggcctgatattagagaagggtgcgattcgcatccccagagataccttggaaagatatcgggctactatccaccgcgcctaccttaccgatacttccgaactgacggaggagatgaaagtggaggtgcagtctatcgtcgcctttgttaagatggtgtatccattgctgccttacaggatatctaagccctataagatgttcattcagaaacacaacatcaatcccattgggagttcctctcagtttcccctgtctcactatcccaaagggtga

SEQ ID NO: 14405 - RNA, 1272 nt, synthetic construct
  source 1..1272: mol_type = other RNA
atgcgagcccagatccaatgtccgaattgctctcagaaacaccatatacaaaacccttacccagggtctttactcctgtgccctcattgtcagaccgcattattgctcgagttatcccctgagctggagaaggaatttcatctccacccaccaaaacaataccggttcactatacacagcggccgaaagaaacagcctctgacccccactattctccctccagaaacactccagcaactgcaggagaaagccttgttcgccctttcgcggtggctagatttgaacaaagagcatctgtccaatgtgctacagctgcttgagcaaaaccaggcttacgacgaattcaagattccaaagactcaaccccacacgttccgccagatttcagcacccaaagaagagctgaagctagtccagaggaggatactcgaccgcctcctgtacagaattcccacctcaaacgcctgtcacggattcacccagggacgcagtatcgtgacaaatgctaagtttcacttgcccaccgcctacgaaatttacaacttggatttgaaagacgcttttccaacagttaacacactgtgggtgaaacatctgctggtgcggtatctgaagattccgcttaaacatctgggcgagcacgtagaacatgaggtcctggatgagatcattctcattttaaccaagatgctgactcacaagaacgggttacctcaaggaagccccgccagcggctgcttgctgaacatcgcatgtatcaaaatggacaagtacctgtataaactgatagccgacaaatatcagaatacaataaggtattcccgttacgcagatgatctgacctttagttccccgactacgatcccacagagcttcagacaagaagtacagcagatcatcagaaattgcggcttttcaatcaacccttccaagatcaaatatctctctaagaagcggcagcagctgcttgaggtgaccggtcttattctggaaaagggccagatcaggattccgaagactaatcttgaaagataccgtgcgacaatccacaatgcgtacctgctccctcacgaggagctcactgagcagaaacgcctcgaagtgcatagcattgtcgcttttgtttctatggtttatagtcacctgcctaacaggatccagaagccatatcagaaattccttgaaaagcacggagggaaacccatcggtaagctgaccaagctagggtggaagacgtatcccccagaccctcccaatcccaagcttacatga

SEQ ID NO: 14406 - RNA, 2166 nt, synthetic construct
  source 1..2166: mol_type = other RNA
atggggcaggataccccaaagcgtaagagaaacaccgcgcatctcactataagggcgtaccaacctctggcctcctactctgacgcggctcatcagctcctggcccagtggctggatgtggacgtcgctttactgcgagaggtgcaccaggccatcagacaaggtgacgcctactatcactataggatccccaaacccggccggcttgagtggcgagacatctttgaaccttacggcgcccttaaggagattcagaggagaattctcgatagactgctgtaccctattcgggtgtctaatgccgcccacggagccgttccaagtagatctgtggtgaccaatgccatgcaccaccttccaaatgcgcaacagctactgatgatggacattcgcaacgcttttccttcggtcagactcccaagggtgcacgggatcttccgccgttacgtcaagcccctgtttcgcaagtttggccccctgccgaacgcaaaggacgcacaacagggaccctccccagtggatgaggctctccacttcctggccgcactgacgactatgaagcagacagtagatacaccacagggaccgagggaaacatatgctcttcctcaaggcgctccgacgagcggctacttgcttaacttggcatgtctggaaatggaccagaaaatcttcaagataatagaccagaacaaggacttaggcctgaggtatagcagatacattgacgatatcactatatccacccctagtgcgatcccacccgaggtccagaacgagctggaactcgctgttatcaagaatgactttcgacttcatcgcggaaaaactcgcctcgtggagacacataacgagaacgccgtcatttgcggagttaccctgagattcgggaggttagaagcagatcccctactgctcgagcgttgccaggaagttttggagaggtccgtcgaggtggctgatccacgaacagagattaaaaggcgctcaaagattcgcggtattgtctctttcttcaaacaggtgtatggggaccaattaccttctggcctgaaagacgtgtatcagcggtatcggaaggcccgggacttgcccgaggaaccagaagttgccgcaccgaccctcgcaccagcagaaccacgcacagctgaagcccaggatgccgtgagccttttagcccagtggctcgacctgtccccgagcttggtcggtctagctggtgagttggctagctctgggttgggttacgaggaatgggagatacctaaggggaacggcaaaacccggaagatctgctcccctaaaaacgagctaaaggaaacacaggaacggatactggatagactcctgtaccacatgcccgtctcagtggcatcccacggcttcgtacccgggaggtcaatagtaactaacgctcaagcccaccttgatgcacaacatctcatcaatctggaccttaaagacgccttcccaagcgtgagtaaacaccgagtgaagctggttatgcagatcgggctgggcaatcttctcaaaaagtttgggctgaggtgcccacggagtctgcgggatgatgttatcgaactcattgcttctctgaccacccacaaagatgagctaccccaaggcgccccgacgagtggatatctgctcaatctggcctgtttgacgctcgacaagcgcatctttgcctgtttgcaggagcataaggtgagcattgcatactcccgctacgccgatgacctaactttctcgacacaggaacctctgcctgacgagcttctgggacagatcaagaagttgattgagaatgccggttttagatggcatcctcataaagtccatgtggcatcagtggccaaagggcaggctctggagatctgtggcctgagattagatggcaatcagatccgtattccccgagagaaactgaaaacctaccggagcgtattgaggcgggcggccatcaaaatccccaccggacaactcgatgcagacacaaagaatcatgtccagggaattgtgggcttcgtgaaaatggtatatggagatctgccacactcacttgcgcagccttatcaggcatttctccagactcaccctgaagctcgtcccactggtagcgctagagaaaagttcgctttatatcccaacgttctgcccgcatga

SEQ ID NO: 14407 - RNA, 2154 nt, synthetic construct
  source 1..2154: mol_type = other RNA
atgtcagataactccacagtccggaaacgaaacacctcccacctcactatccgaaaacgttcaccgctgtcaagctattctgacagcgcctatagaattttgtcccagtggttggatgtcgacacctcactcctatatgaggtacttgaagctctcaaggccggcgaagcctattacacatacaagattcccaaacacggtacttacgagtggcgtgagattaatgatccttatggtggcctgaaagagatacaacgacggatattggataggcttctctatacagtccctgtgtcaaacgcagcacacggggctgttcaagcccggagtgtagtgacaaacgcactggagcatctgcctgacgcgaaagaggttctgtctttggatataaggaacgctttcccaagcgtgagattttctagagtacatcggatcttcaggaagtacattaagcccattctccgcaagcatggacccctgccctctcctaataccggaggcaaccctcccctggatgaagccatacacttgctggccgcactcactacgtacccccggagcatcaagcagaaagggcagactcagaaagtctggtgtttgccccagggcgcccccacatctggctatttgctgaacctagcatgtagggctctggaccgaaagattttcaaaattttcgacaagcacccgaatctaaatctccggtactccagatacctcgatgatatgacgatcagctcctctgttgagctgcccgcggacgttcagcgcgaattagagttagccgtgaagaagaatgactttcggcttaacagggataaaactaagaagtacggcccaaccgacacgccagtaatttgcggggtcatgctgaggcagggacacgttgaggcagaacctgagctgatccagagatgcaacgatcttctgaaaagatcagtccatgtggacgatccacgtgtcgaactgcaaaaccggaggaagattcggggaatcttgagtttcttcaagatggtgtacggggaccagatgcccaccgaaataagcgagccctatagcgagtaccgctcggcccggaatcttccgcctgaaccttccattccagcaccggcccatccaacagtcagcgcacgtgccgtggaacatcagtccgccatgtctctgctagctcaatggctggacatttctatggacaccctgaacaccgctcaccagaaatctcttagcgaggacggctacgaacactggtcaattgacaaaaagaacgggagtaagagacagatttgtagtccatgcctggaggttaaggatatccaggacaaactcctgtccagattactgtatcacatcccagtgtctgtggctgcccacggatttgtgccagggcgctcaatcgtgacaaatgccctggcgcacgcgaatgcccgctaccttctcaatctggatctgaaggatgcctttcctagcgtgtcccggaagagagtggaacattgtctcaatgtggggctaggaggtcttatcaagagattcggcctgcgctgccccactgcacttaggcaggatgttattggactgatcgcagacttcgtaacatacaaggacgccctccctcaaggcgctccaaccagtggctacctgctcaaccttgcctgtcatacccaggacaaacgaatctttgaactgttagaacgtacggctcccaatgtgacttatacccgctatgcggatgacctgacatttactagcacggagccgctccctgaaggtttcttggaggcaatacagaatgagatcaataggagcggattcaggtggcacccacaaaagacccactttgctgcagtccacaaaggtcaaaacatggagatctgcggcttgcgcctcgacgggagtacactaaggatcccccgaaaaaagctgaagcattatcgctccgtgttgcgcagagccaccaacaagctcgaaaccggtggattagataccgagacacggcataaaatccaaggcatcgtcgggtttgtgcagatggtgtatggggaattacctaggagtctgagtcagccatacgctgctttcctgcagaaacatcctgaggccagaccaactggctcggctcacgagaaaatctccttttaccccaatatacagacttga

SEQ ID NO: 14408 - RNA, 2160 nt, synthetic construct
  source 1..2160: mol_type = other RNA
atgtcagagacaaacacacccaggcctcggaatcggtcgcatctgaccatccaggctcgcagaccactcgccagttatagcgatgcagcctaccggctgcttgggcaatggctggatgtcgatactggccttctgcaggaggctctggaagcgatcctcgccggtcaggcctatgagagtttcaggatcccaaagccaggaagggacgaatggcgcgtcatcttggacccttatggaggacttaaagaagtgcaacggcgaattctagaccgtcttttgtaccctattcccgttagtaacgctgcgcatggtgccgtgccagggagatccgtggtcacaaatgcacggcaacatctaccagatgcccaggagatccttagtatagacctgagacacgcattcccctctgtgcgattttccagagtgcactctatcttccgcaagcaggttaggccgctgctgcgaaagttagggccgcttccaaccgcccacagcggtacattggacccagtagacgaggtcattcacctgttggcaggactgacaacctacaagcagaccgtgcgacagcagggtagaactacccaggtgtactgcctgccccagggtgcacctacctctggttacctgcttaacctggcttgccttcccctcgatggcaagatctataagatcatcgagaagaaccccgagctgaacttgcggtattcgcgctacctggatgacctggtggtgagttcccccaatcagctgaacgacgaagtgcagaaggaggtcgagctcgccgtcgtcaagagcgattttcacttaaaccaccagaaaatagctcgcactcaagcacctgcccccctcgtcgtttgtggggtgcagctgagcggcgaacagctcaccgctgagggaggattgattgagcggtgtgccgacatgctccgtaatgccgaggctgtcagaaaccctactgccgagcagaaattgagacggaagataaggggagtaatggtgttctttagacaagtgtacgggcaggatttaccgcctaatatagccgagccttaccaacagtacagaacaaaccgacagctacctgaagagcccgaaactgtagctcaggccgtggccccggttacattggcgacggaaccctctaatgcagtggagctgctcgcccagtggctggatcttaccccagaaacgattgcggaggctagggccaagattcaagccggcgaaggctacgagtcttggtccattgataagggcaatggctccaagcgcattattacatctccagttgaccaactgaaggacatccagactcgaatcttatcacagctgatataccacattcctgtttcaaatgcctgccatggctttgtacctggccggtccatagttacaaatgcaatgacgcatcagggcgcaaccagcctcattaacctggatcttaaagatgctttcccatctgtaagcaaacatcgcgtcgaactgggactgcgcattgggttggggcgagtgatcaaaaaatttggccttcggtttcccaggccaatgcgcgatgaactgatagcattgctcggggaactgctgaccgtggacgaccagctgcctcaaggcgctccaacatccggttacctactgaatattgccgccatgtcactggataaaaggttattcgaactcatccaggagcatgatcaggaagtgacttataccagatatgcagacgacctaacttttacatgcaaggacggagagctcactacggatttcctcaacaaattgaaacgtgtcatccgccgctcaggattccggtggaatccacgcaagacccacagggcagaggtggataagggccagcagattgagatctgtgggatctacgtggacgatgacgggttaagactgcccagggacaaaatgaaggcttaccggagcatcctacgtcgggcggctacccaaattcccaccggccagctcgatgacgctactaaacgtcaaatccaaggggttgtgggatttgtggaaatggtatatggcgaactgccaagaagaatcagcgagccctatcaggcgtatctccagcagcaccccgacgctaggcccaaaaggctctacagggacaaaatttccttctatccgaacatcatgcctaacccttga

SEQ ID NO: 14409 - RNA, 1038 nt, synthetic construct
  source 1..1038: mol_type = other RNA
atggaactcaatagacccgccgacaccgctttcgcaatgctggcccggctgttgtcaacagacaacgaggtggtgcgcgcgggacatgaagctctcagtgggggagatgcctaccgcagttgggaggtcccaaaagggaacgggaagacgcgcagaattgatgcccccgtggaagaattgaaacaggttcagagcttgctcctgactcgcctcttctgccacgcacctacatctccatttgcccatggcttcgttcccggcaggtccatcgcaacaaacgccgccgttcaccagcagactgggagatcactggtgtctcttgacctggaggacgcttacccatccgtatcgcgacagcgggtcgtaaaaaccttagagtggggcctgggctacttcctgaagcacgtcgctccttgttcaagtcgggagagcagagacgaattgtatgaactgattgcagacctctgttgttttcggcaatgtttgccccaaggggcgcctaccagcggactgttacttaacatggcgtgctgctccctagatagaaggtgtgctcgactgctaagaaggtgccgagatcagtttccagaactccgttataccaggtacgccgatgacctcagctttacctccagcgaggagttatcccacgagttcctggagcaggccataggctgcgtagtccaagcaggatttcgggtgaatcggagaaaggtcaagaggtattcggtgcgcaatgccgacctcgttatctgcggaatcaggctgcatgagggccaactgactctgccgcgccgagtgcttagaaggtatcgtgccctacttttccagtctctggcttacggccctgatgaaataagcgaagagaataggcagtttctgcttggtcatatcggcttcctgacaatggcttcttccgtgtgtccgcctcagcttgagcggctgctcgaggaagtgttacagcagcacggatcatggctgcgcagtggtgtggcatctcacattttgccctcttacggtgaggtggggcgtagctga

SEQ ID NO: 14410 - RNA, 1035 nt, synthetic construct
  source 1..1035: mol_type = other RNA
atgggcatgaatgcctatgccgacagcactttgtctctcctgagccgactgctcatgacagacagggagactgttaatagtggctttgaggctctctctggagttgcctatgattcttggacagtgccgaaaggaaacgggagggaaagacagattgatgcccccgtccctgaattaaaaagactgcagtcactactgctcaagaggctgctgaacttcgcgcccatatccccgttcgcccatggattcgtgcggggcaggtccattgtcacaaacgccgctgtacatcgcgagactgcacggtgtatggttagccttgatcttaaagacgcatacccctcggtgtccagggatagggtggtgaaagcactgcaatggggagtgggatcattcctcaagcatacatccccagaaaccacccggggcgaacgtgaggctgtgtttgaggccgtggctgacgtatgcactcatcgagacgctcttccacagggcgcccctacgtcaggccagctactgaacatgacctgctgcagtttagatcgacactgttctcgcctgatgagagcaagccgggaagagtttccagggttgcgctattcaagatacgcggacgatttggcctttacagccaccggtgaattgagccacgagtttctggaaagagccatcggttgcgtcctgcgagcggggttcgaggtgaatcggcgcaaggtgaagcgctacactgtagctaatgccgacctggtgatctgtggaattcgtttgcacgacggtcagctcactctaccacgccgtgtgcttcggaagtatagggccctgctctttcagaccctggcaagagaacctgaggatatgagtgacggggctcggcaacacgtccatggggctatcgggtttctgaccatggcaacaaccgtctgtcctccccagctcgaggatctgcttcaggctgtcctgcaacagcacggcacctggttaagacctggcacggttcccgcacacttcccattctacagctccttcagtcaaaagtga

SEQ ID NO: 14411 - RNA, 2934 nt, synthetic construct
  source 1..2934: mol_type = other RNA
atgacggaacctactcagcgggccgctaggctcgcacgtctgatgagccgcggtgctgccaccggtgctagtgaagcccgggcaacaccccacgaagctgcaaggagggccactcaggtactgatcggggcattgctgccgggcgacgtcgaattgcaagccgccctggggggtgatttgtctgccctggagcatgcacaaagacccggcccagcgcaagccttgctggatgctctcctggatgctctggagggcccattatcggcccctctggcaggctgggtggaacttgctgagggaggggcgtctgacggtgccttatggcgggctgtggacacccatcttgccagacccgagtgtctggctctccggagggccttaacctctaggtgggccgctttaccctcaacacgcgcccgtctcagtgctctgatcgatgccaggccatctctgagaggtgcacgaggccccctgaccggattgttgtccgccgctctgtccgcctcagagagtctgcggggttcaagactctccgaggccctccgggttgaggtttacgtttcttacagaagattccagcgagcactcctgtcagacgatttgcgatctgcaggagctgcgctggatgacctgttcgggtacactcccaatcgcccggccctgttaatcagcgatgccgccctctgtgtcctcgagggtagacctggggaggctcgtcgagcactgtccgaagcgctcgctttcatccacgaccatgccgccttggaagccgcctacgctgctttagcagcaccccccaggttggagaagaccgcagctgcccctcgccatagtcctagggatctgcggcctcgattaggcatcgaggggagggcagtgagagcagaagggcgggtgtataagcctcgcttagacagatggagcccccggccgtcctatgcaagatgggtcatcgaggccgtggcggcagctttaggaagggctcctgaggccattgacgccgctctgaccaccctccacagaggagaggcctaccgagcattcacaatcacagcaccctctggcaagcctcgaaggatccaggcgcctcaaggcgctctcatcgagattcaggcggccatactcgagggcctgctgtatcgcctacccgtcagcaatgccgcgcacggagccactcctggtaggtcactgattactcaggccgtggcccatctgcctcagcctcgacaggccctgtccctggacctgaaagacgcctatccatcggttagctttcagagggtctatcgcgttttttacgaggggctcgcacgcctccttccagtagcacgcctgccaggactcgaaggccttcgccctctcgtggcgagagatcacctcgcgcacttgctggccactctcacctgtgcaccccttcaaggcgccaggcccaaacccaaaacagcttgggcactgccacagggtgctccgacttctgcagccttgctgaatctagcatgcgctgacctggaccgaggcgtgtacaagctgttgcgagcccacccaggggtggacctgaggtacacacgctatattgacgatctgaccattacagctacaggaggcgctcttccggaaggcctgacccgtcaactggagcgcctgattgagagagtgggattttcctcccagccgctcaagcggagggcatggagagtaggcgaagggcccctaatcatttgcggacttagcctagagtccggcggggtcgcttttggacctgacttaatcgcccgggctgccacgttatcagcgcttggcgctccaggagccgcggaattacgcggactagccgcttttgcccgacagatttatgcccagacgccccctttcttgcagagttgggcagaagccgccccggcaagagcatggagtagtccgcgggccccttacttgcgttacctgcagggcgatcccactgcagcagctcctggcgtcgcccaactggctagatggctcgacgcccccatggctcaagtggaacgggcccttgcgctcttggaagctggtgccgcctacgccacgtggagactgtctaaaggcgggggcggagagcgcgaaatcgaatccccagctgccccacttaagggcctgcagacccgcatcctgcataggctgataagccgcgcacccttgtccgcagctgcacatggctttgccgagggaagaagcatcgcgacaaacgccagagcccacctaggggctgcagcacttctgaacgttgacatagaggatgctttcccttctgtgagcgcccagagagtgagacatgccctcgatagggccctaggcccacggttagcatcactggggcccagcgctgaagctgctagtgaggccctgggtctgctgacacgcctgctcacctataggggtcggcttccacagggggctccaacctcaggcgcgctattcaacctatgtctcactccacttgatcggctactcgaggatgcctgcggaccccgaggcattacttacacccgttatgccgatgaccttacgttcagtagcccacgcgtggaggcgatagatgcggccttcggggaccagattaaacagatcattcaccgggccggctttaggtggtctgcccgtaaatgggcacggatggcggcgccaagactcgaagtgtgcggggtacgcctggacggagctcatctgcgtctgagcagagcacagctgcaacggtaccgggctacccttcaccgtcttgcccacgcccctacactggacgccgaaggaagggataaggcagctgggattttggggtttgtccacatgatatatggagagctgccagctccccttaggggacccgctcaagcattgaggcagcggcaccgccttgagccaaagccaaaaagcaagctcgacctctatggtcgggggtga

SEQ ID NO: 14412 - RNA, 1059 nt, synthetic construct
  source 1..1059: mol_type = other RNA
atgcccggcaggtctgctactaccctgctggcaaagcttattgacttaccggcaagggaagtggaggaagcattggccctggtgacaggcggcgaggcatatgataggtttgagatacccaaggtcggcactagggccccacgcgttatccaggcacctgtggagcgcctcaagcgggtccagagagctcttatcggtttgctggaacccctggctctgcatagcgctgtgcacgggtttcgccgtggccgaagtattgtcaccggggcagagaaacatttgcaggcgagggccattctgaacattgacctcaaggacttctttcattccgtcgatcgggatcgggtgaggcgtgcgttacagcgctcactcctgccacgcttggttgaagaaacaggcgaactgacaaaagcagaaggtgatgccgtcgtggccctggtgaccgaactcacgacatatgctgtccctggaagagacttacccgtgctgcctcaaggagccccgacctctcccttcctagcaaatctcgccgctcggaaactggatcaggagattagcgagctccttgccggactaccgggagaactggtatacacgagatacgccgacgacttgacaatctcggccccacacgaaatcgacagaaggcttataggggaaatcataaagcgagtgcagagggcaggttttgctgccaaccctcaaaaggttagactggccagtaccctgaaaggtagcccacattaccgccagaagctcgaggtaaccgggttagtaatcgatcctcgagacaaagttctccgcatcccccgggatcgcctggagttgtaccggctgaagattcaccaagccgcccaccttcgtgagctcgacccaggaactagacaggagatcgaggggttcgtgtccttcgcctttatggtgtatcggaccctgcccccttccctggctactgcatacgagcgattcacagctgcgcacagactagcgccactccaagctggcaagtcacggcgagccgctagaagaagggccactcagaaagagctttatccttga

SEQ ID NO: 14413 - RNA, 1056 nt, synthetic construct
  source 1..1056: mol_type = other RNA
atgtgtgacccgtgcggccttgacccccaaggttcctggccaccagtggcaatagagactcccaccgtgctgtctgccgattgcaagatggcgttggccgacttactccagttgcctagcgggcagattatctcggcatgggacgcagtgaggggaaacgctgcctacgactggcacttgtttggggccagagaagttgctgtgccagtccctctgctggccgatgtccagagacgcgtgctcgatagggtgcttcggacaggccctgtgtctcctgcagcttatgctggagtgccaggacgaagctacgttgccgccgcctggaggcatttaggcggcacaggcgctgaaaccgtcgtgatggatatagccggcgcttttgggagtacgacctacggtcacgtgcggagcgccctgtctagacggctcaagcacgaactgtgggtacttggtctggactccgatgatgctaaagcagtcgtccaggtgattgcccatcttgtgacagtcgatatggatggtcgatccagacaactgcctctcggggcacctacctctgtcgccttgtttaatttagtactcctgtcactggacggtgacctcgcgaggtggtgcgttccacgcggaatccgctatacacgctatgttgacgatatggtcttcagttgttccgagggagtacccaatcagctggaagagtttgtggagcataacgtcgagaggttccgtttccggttgaatcagaacaaaaccgtgcgcagtgctgcagggatgggcactgttcacggcctggtgcggactgctgacggaatcgtaccgggggagggcgctagaaggcgatttgcagacaatatccagtggcacacgagacaggccgaagacgaggccacttcagaggcgcatagggagaagtcaagagggttcctgaaaggcctgaacaccttccttcgtcaattctacgaacggcaggatctagcacgccccgaaatgctcaagattcacgttcccgaaggaagcacagccgcgagccccctagtggatctgctgtgggagtga

SEQ ID NO: 14414 - RNA, 906 nt, synthetic construct
  source 1..906: mol_type = other RNA
atgtggcgctggtggttgagactggccccagcagggcgttcggaagtcgctgttcccgtgcctgtgctttcagatctgcagcgccagatcctcgagcggattctgcggacaggacccgtcagccctgctgcatatgccggagtgccaggcagaagctatgtagctgcggcttggaggcacttgggaggttccggtgccgagacagccgtgctcgacatcgccgatgcgttccctgccaccacatatgggcacgtccgcgccgctctgtttagaaggctgaagtccgaactctgggtgctgggactggaccccgcggattctaaagtacttgtgcaggttctgtctcacttggtgaccgttgacaaggggggccggtctaggcagttaccccttggctccccaactagtgtggcaatgttcaacctggtgttactccctctggatggcgaattggccaggtggtgcaagcctggtaaaataacctacactcggtacgtcgatgatatggtgtttagccaggccgacggactaccagtaggcttagagacgaccgtgcatcgggccgtggtcagacacggcttcagactcaatcctgcaaagactgtgcgacgccctgctggccaaggaactgtccatggcctagttcgcgtagccgcagggattgtgcccagcgaaagggcccgagagagatttgcaagtaacatccgttggcattccgacagaaccgccgacacgacaatcccggctccccaaaggcagaggagtcgaggttttctgaaagggatggacacctacctgcagcaattctacgagcgccaggagatttcacggccagggtcactggagatccagataccagaaggcgctgcagttccgccacccgctgtcgatcttctctgggactga

SEQ ID NO: 14415 - RNA, 1014 nt, synthetic construct
  source 1..1014: mol_type = other RNA
atgacggtcatcaccattcctgatcctcttagtgatgattgccgggtcgccctgagtgatttgctgaggctgccagttgagcaagtgatggctgcctggaaagttagccaaaccgaccggggttacgattggaatctgtatggggaccgtgttatccacgtgccccagcccttgctcagcgaggtgcaacggcagattttggatagggtgctgcgaaccggccctatcagcccagcagcctttagtggagtgtctgggcgctcctacgttctcgccgcgacacgacatctatcgggccctccagctgagacagctgcattagacatcgcagacgcgtttggatcaacgacttatgggcacgtccggggtgccttgtggaagcgactcaaacaggagctgtggatactgggtctgtccggctcagagtcaaccgccattgtaaaggtactgagccatctcgccaccgtggccgacagagcaaggactcggagactgcctttaggatctccctcctctgtggctatgttcaacctcattttactaccccttgatggcgaaatgctgcgctggtgtagcgagtatgggataacttatacaagatacgtggacgacatggtattttcatgcccggacgggttgccacccgatcttgaaagccgggtggaggccgtggtccgcagacataggtaccgtctgaatcacggcaaaacaattagacacgctgcaggctctgcccgcgtgcatggacttgagcgcactacagaaggcgtggtccccggagctgacgcagtggaacggttcgccgctagagctagatggcaccagggaaaggcagtcgatgaaacctcctcccgctctcagcgagagaggagttacggtttcctcagagggctggacgtgttcctgaggcagttttacgaggcgcaggatctccagaggccagactcccttaggatcgtcgtaccggaaggcgccgaacgtcccgttcctccaatcgacctgctatggaactga

SEQ ID NO: 14416 - RNA, 999 nt, synthetic construct
  source 1..999: mol_type = other RNA
atgaaaatgctgcctccagagtgggagcagttgtgggaatgcactaggtcggggaatgaagtcacggacgaggtcaccttccacgctcttgagtggctgtatgataacaggacaaaaaagggaacctggttccacaacccattccgcgtggaaaagaagaataagcaaggccagttccgccttatctcctgggccggcccacaactctctattgttcacttagcaattagtcggtggcttaagcatgagtatgtgagaaagagcatggatgctagcacacccggagcaggaggcgtgatggtggccttgagagcccatggagataataagtttgtaacactggtggacgttgctaacgcgttctcctccgtgtcagagcgaagcttgtctgccgccctgcgatgcctaatggatgatgtcaccgaggaattcctggatgtgctactcgagctcacgaccgtagacggccatgtctggcagggttggtccgtgagtaaagacctcttcaacctcgtgatgttaaatctggatcctgtagtctttgaccagctcccctttcttggggtcgagatctatacacgttacgtggataaccttatattctcatctagcaaaccgtacagccctattactctggagcggtttttgaggcacgtgttcaagcagtgtgggttcttgctgggcccatttcagcattccgaccagggaagatattcatatctgggtgtgatggtagaagaaggtaactaccgtccccaggacgttaaacgctacgttgtcgagatagaaaaggccctgcaacacccgtgtcctcacttatactattggactattctcgggtacttttcatggaccctgagcgtgtctagggacaatatccccaaagaactgtttgaggtgttcgaacggtactttaaactggttggcatgatccctcccgcactacagagactgatgatcatgcggtaccagatgagttttgctgacctgcaaaattga

SEQ ID NO: 14417 - RNA, 1038 nt, synthetic construct
  source 1..1038: mol_type = other RNA
atgacagaaaagaagtacaaactccagccactggaaaaggtcagtcttgatgtgcagttttcctggaccatgggcattatcgccaagttactcaaaataaccaagaagaatctcagaaaggccaagaaaatcgtctcggccccaaagtacgacgatgaaattctgataaatggcatgcctacccagatcacattccactatggattctacgggttcatcaagaaaatcaagcgcaaacagcgcaaaattctggcaccccacccgaagctgcagatcgtgtttcgggcaatcaaagacacattagtcgaaatggaacccactcacgagaacgcctttggattcgttaagaaacggaacgtccagatggccgtgagatccctccttggtaacgctcattttatctcatttgacattgcggacgctttcccgagcattactgctaagatggtggagaactctttgaagaagctgaaactacaggaggagctgatacaacccttgactcatctggtcacctgcgattacgatcaagagaggaggctgccacaggggtctagctgttctccagcaatcctcaacctcgtgtacaagcccatgtgccaggaaatcgatcgggtttgtggtacacataatatatcatggttcgtatatgccgacgatttcaattttgctgctctagtgattccccctcaggcgaaaaatgaacttcttgccattccacccaaatatggctttagcacgaaagcatccaagacaaaggacaacttggggaaaactatccctcacatgttgggcctgacgattgtggacgagaaggttcacatacggaggcgcactaagaaaaagttcagacgaatcctgtacatggcgtggaaatatgaggcctacagccctcaacagattagaggggtagctgtggccattcgtcaaacctatggaaatgagaagaactggcctggttggctgaaagagtactggatcaaatatcaaaccaagaggcaggcagaaggcggacgatatgagaaaagtgcccagtga

SEQ ID NO: 14418 - RNA, 1035 nt, synthetic construct
  source 1..1035: mol_type = other RNA
atggtaagggagaaacatgaactacagccaatgaagaatgtgtcactggacgtgcagttctcttggaccatgggcattatggctaaattcctgaagactactaagaaggaacttcggaaagtcaagaagatcattgacgtgaaaaacctcaaagatcagatccctatcaaaggctcgtttgttaagatgacatttacacatggattctactcctttaccaagaaaattaagcggaaacagcgaaagattctggcccctcatcccaaagtgcagatcgtactgaaggccatcaaagatacgctggtggagctctctccagcccacgaaaatgcattcggctttgtcaaaaagcgagatatccagatggccacgaggtctttgctcggcaacacacactttattagctttgacattactgatgcgtttccctccatcacagctaagatggtggaaaaagctttacgtaagctgaaaatcggggaggaacttataaagccgctgatatggttgaccacatattattataaccaggatagacggttaccacaggggagtagctgcagtcccgcccttctaaatctggtctatgttcctatgtgccaggagatcgacgaggtgtgtaaagcacatggtattaagtggtgcgtgtatgttgacgatttccacttcgccgctctcaagatagttcccgacgtcaagaaaaaactcttgaccatcccgtccaaatacggattcagcataaaggccaagaaaattaaggacaacttcgacaggaccattccacacatcctgggtctgactatagtcaatgggaagattcatatcagacgctgtacaaagaaaaagttccggaggatcttttacatggcatggaagcacggagcgtactcacctcaacaggtggaaggaaccgtggcagctatcagacaaacctacggtaaggagaagaactggcccgggtggctgcgcgagtattggaccaaataccaaactaaataccaaactgagggaggccgcaatgggaagcacggctga

SEQ ID NO: 14419 - RNA, 999 nt, synthetic construct
  source 1..999: mol_type = other RNA
atggccattagtaatgagatgtgtcccctgagcgtggcctcgattcaggtgcagctgcagtggactctcgggggactgagcgagctgatttcagtccccaagaaacaattgaagaaagcattcaagatcgtgtcaacacctaagctcgaagcaaccatcatgaagagaggggggctggtacgaaaaacttttctttacggctttgccagctacataatcaagaataagaacaaggaacggaaaattctcgagccccacccagaggtccagaaggtttacaagaagataaaggaatggctggagaaagtggacccgcctcacgaacgcacattcggatttgtcaaggaccgcaactgtaaaaaagcaaccgagacattgtctgccttgttcaggggtggccaccacgtcgcattcgacatagccgatgcttttccgaatattaccgaagaaatgatcaaagaggcgctgctgcggcttgaaatagaggttgatatggctgaggtgctggcctggtttgtgacctacaactatcagggcaaacgtagactgccccagggctccagtagctctccttccattttaaacctcgtctataaaccaatgtgcaaggagatcgacaggttttgccaagctaacggcatcgaatggtccgtgtatgttgatgatttcaacttcgcggctccttctattagttcagagctgaaagacgccttactcagcatcccctcccaatttggattctctattaagcctaagaagaataaggacaatctaggcaaaacgatcccacatcttctcgggttgacagtggctgatggaaaactgcatttctcacggactcagaagaagaaattcaggggtatcttttatcttgccgtgaagtaccaggagtatccacctgaagtggtacatggtattatgagatacgttcaccatatctacggacccaaagagaattggccaggctggctaatcaaaatggggggtacccagtcctga

SEQ ID NO: 14420 - RNA, 924 nt, synthetic construct
  source 1..924: mol_type = other RNA
atgcttgagaacaagtctggttatcgggtctggtctattccaaagaaatcaggagggaaacgccagatccaggctgccctttggcccctgagagaaatccaggcgaggattgccgctctgatatacccctatagcatatccgagattaatcatggattcatccctggcaggagccaccagacagcagtattgccgcacttgctggccaacgctatgttttgttgggacattaaagacgcgttcagttctacaaccaagaaacaagtgctgctgaaattcagggtcattggatttaacaaccctctcgccgacctgatggccgacctggtgtgctactccgcaacgggtaagtcagaggatgggtttttaccacagggctactgttccagtcctattatatttaacctcgtgctgaaggacatcgatcggctgctattcctgtttgcccagcagcgcgattaccagattagtcgatatgtggataactttgctatttcgaccccaaagaaggaaatccctcgacaagatcgcgaattggtggtgcgcatagtcatgaatctcagcaatggctcatacaaagttccggaagaaaagacttcctacttcaaggtggaggaggacaaagtatgcttcgaattcctcgggctcgttatcaaaggcccaaaaaagggcaaacgtgagattcgggtcactgacgagaagcttgctgattatagatggaccatccatgacgccttagagaaaggtgactttagcgatagaaaggtcagagagatcagggggaagatcaattacctgaagagcgtgtatcagcgtcagtccttgcctctccccatccggatcatggaactatatttccagtaccaacaaatggcagaggttgcaaagacaggacagctgcccctgaatctttctggcccctga

SEQ ID NO: 14421 - RNA, 918 nt, synthetic construct
  source 1..918: mol_type = other RNA
atgctcgagacaaaaaaagcataccacgtgtggttcatcccaaagaaaccggccggaaagcggcaaatccaagcagctagatggccccttaacgaaatccaggtccgaatcgccggtaagatttacccctatagcattagcgagatatcccacagttttgttccaggtcgctctcatcgtaccgccgtgtttccgcatctgagagccaacgctttcttcaccttcgatattaaagacgcttttcccagcacgcgcaagaagcaggtagccgctaatttcagatggatcggatttaaaaaggccgtggcggacctgatggccgacctgatttgctactcacctactgaaaaatcagaggacggcttcctccctcaggggtatgcctcctctccaaccgtttttaacctgatcttaaacacaactgacagggtattgtttgggttctcccagaagagagggtatcaggtgacgcgctatgtggataattttgctattagtgcgacccagaaaacaatccctgaggaggagcggaagctagcgatcaagattgtcaaatctcttagtctgggaaatttcaagattccagaggaaaagacatcctatcgggaggcaggcgaaaaggaagtccacttcgagtttctgggcttggtgatagaaggtcctagggatggagagcgtaaaattggcgttgctgatgaaaagctggcagactaccggtgggtcatccaggaagcactggataaagaagattttagcgagggcaaattcagggaaataagggggaagatcaattacctcaaatcgatctaccagggccgcgccttacccaaccaagtggccgagttgtataaccagtacagactgcttcgagagatcataaatactaccaagagggggcaactctcactgcccatttga

SEQ ID NO: 14422 - RNA, 1017 nt, synthetic construct
  source 1..1017: mol_type = other RNA
atgatcaccccgggtagaaaagaagccatttctgagctggcagtggctttggagatcagtcctaatctcatcaatcgggccctccaaatgattacagacaagaccgcatacaatgtgtggagcaccccaaagaaatccggcggggaacgccaaattcaggcggcaaattggcccttgaacgagatccagtccaagattgccgccgagatatacccatatagtgtctcagagattaaccacgctttcgtcgctggaaggagccaccgaacagcagtgctgcctcaccttagagctaatgcctttttctcattcgatatcaaggacgccttcccgtctgttagccgaagacaggtcctcctcaagctgaggctgctctcggttcagctgggcctaaaggacagagtggctgagcttattactgatctggtgtgctattctcccactgggaaatctgaacatggcttcctgccacagggctatcgcagcagtccacatattttcaaccttgtcctcaaggacatcgaccggatattagccggatttgctcaaaaaaggggctatcagataaccagattcgtcgatgattttctaataagtacgacagagaaagccatcccccgcgaggatcgaaggctggtgattaaactggtagaaaacctggggggattcaagatctcccctgagaagatatcctacctggagagcgaaggaaacgacgttcattttgagtttcttgggttggctatcaagggtcccagggaaggagaacggactatgggtgtggcggaaaagaaattgaacgaatgtcgttggatcatcttaggcgcaatggagcagaaggatttttccaagaaaacctttcgtcggattaaagggaaggtgaactacattaagggcatttacaaaagccagggtaaacccctgcctgcgaagatcgccgatgtatttgcccagtaccgctcattacgggctatcgcagacgccgacaagaatcaacaggtgctgttcaaaatctga

SEQ ID NO: 14423 - RNA, 987 nt, synthetic construct
  source 1..987: mol_type = other RNA
atgaacaatgaaaaactcaagaagggcataaacgagatttgcaacttcctggagtacaaccctggcatcatggatctggagaaagcattcgagggacgcaatagttaccaacgcatttttatccgtaaacgcggagggaaaaagaagggaaagcgggtcattcacgtgcctccccccaagctcaagaatgttcagtcagttatccaccggcgagtgttagagatggtggaatggccagcttctgtgcatggcttcgtgaagaatcggtcccacttgactgccgctctgaaacatagcaggtccatcccaccccccgtggctcttttactgattgactttaaggacgcgttcagcaacgtcggcgtgaaaaaagtagaaagagctctggataagaggcttcagcctaatctgctttgtcccctgagtccaggggccatcaagctgcttgccaagctgatcacctacagagggcgactgccgcaaggagccccatcatctccgacaatttttaacctagttgcactcgatttggacgaggttctgagcgtttacgccgaggaaagaggctatacctatacgaggtatgtcgacaatatagccgtgtcctcacctaagcctattcccaaaaacgaaagagcggagatcatcggcctgtgccgacagtttggatttcaggtggtgagtgaaaaagcccgctaccaggaagcaaagtggggtgtactcgagatgaccaaagtcctgctgcagccctatggtggtcaaaaatggtatgccagctacgggctaggcttgtctaataggaagttcgtggataaggtcagggctatggtgcatagagcacagaaagacccatcaatctccttggcaagcatttgggggaaaatagattacgtccgtttagtagacccatataagttgagttcgcggctctccaagcctatgagacagctccggtctatacagagcaacctcgagcgcaggaaatga

SEQ ID NO: 14424 - RNA, 981 nt, synthetic construct
  source 1..981: mol_type = other RNA
atgctgacgcccttgggatgccggttccaagagctggtgtcccgcgctgctcagttgctggcagtggagccggctttgatcgagcaggctctccaggaaaaggggcagtaccagcgacggacacgcaagaagcccggtaaggatgccgagggtaggccgagaatccgagtgttgcacgtgcctcctccagtcgtcaaagaggtgcaaagggctatacacagacatctgcttaatctgggtaacagctggtttaggaaactcggcagtgatttcgcttggcctatcgccatgcatggctttctcccaaggaggtcgaaccttacagcagctcgtgatcacatcgggaacacagccctgttcacactggacttcgctgacgcatttccctctgttaggcgggaacgcgtggccactgccttacggtggcatgcgaagttaggacggcaggaagcaaattttattgcgcgccttgccacgtatcggggcagactctgtcagggctcacccagctcaccactgctgttcaacctcgtagttcttaatctactcaaatctctggagcggttggccgcagaaagggggtaccgtgtgactatctactgcgacgaggtagccattaccgcagataaacccatacctgccgaggaaagacgggcgatcctgcagctggtcattcaggccgggtttgcagtgcatccaaaaaaaatccgctatcaagaagcccgctggggcgccttagaggttactaaggtgctcgtccgtccagacagacttggcctcagtactagacacaccattgatagggtcagagcattcatagatcacctggcccgaagaggaaccgctgacaccaaggaattggccaaggctaagggatatattgggtgggttgaactggtggaccctgagaaactaaagacccgcctgcgaaagtccctggcccaactagcgaaactggagcagtccggcggacacagctga

SEQ ID NO: 14425 - RNA, 1017 nt, synthetic construct
  source 1..1017: mol_type = other RNA
atgcagcaggctgagctgccactgtcacccaacaatgccccctggccggacgattttaggacagcccttggcttggacgaagccgcgcttgcagaggcatggatgcatcgagccgactaccggcctcatcgtgtccctaagcgcaaggcgcgaaggattggacccaagcgggagcctcgggtggcaaagaaaaagagacgcccgattgatgaaccacacccggctctccgggtcgttcaagaggccatccgcaggaaactactcgagcagatcccactgtccgcatgcgctcatggctttagaaaaggtcgctctgctaaaactgcgctcttgccccaccgcaagtccacgagcttcttcactgtagacttccgcaacgcattccataaggttaccggtgcaatgcttgctgaagccctgagagcctgcacacccattattaagcccaggtgggtggcgcctttggtcgccttcacaacgcaccgaggccggttaccccaaggtgctcctacctcgaacgatctattcaatatcgcatgtcgagaacttgacgccaacctggctgcctttgcccagactagggggtttgtctatacaagatacgcagacgccgttattattagtgccaaagcacctctgccaaccgatctccagcgggaaatcgaggccaagatccgtgcttacggctttccactggccgctgagaaaactggctataccgaaccaaggtacgctcacccagtcatcatgggaatcgcggtggtggatggccggttaagagtgcccaggaggcagctcgatcgtgctagagcttttctgcatcgcgccaaactggaccctaccataccgatggagattgtggagggggtgctggggaatgtgcgaggacttataggggggctgccccccagactgctgaaaccttataaggccctcttgatgtctagacacttatgggtgaggtacagacggcggcgcggaatcccatatgtagcacacagccctatgcagccatga

SEQ ID NO: 14426 - RNA, 990 nt, synthetic construct
  source 1..990: mol_type = other RNA
atgccagcaccttggccagatgatttcagaaccgctctgggtcttgacgaagccgcactggctgatgcttggctccacagggccgactaccaaccacaccgcgtacccaaaaggaagccccggcggatcggaccaaaaagacagcctaaagccatcaagaagaaacggcggcccattgatgaaccacaccccgccttgagagtggtgcaggaggccatcagaaagaagctgttaaaacgtattccgctgagcagtgcagctcacgggttccgaaaaggccggagcgccacaactgcactgattcctcaccgcaagtcagcagccttttttacagtggactttcgaaatgccttccacaaggtcaccactgcaatgctggccgacgctcttagagagtgcgcccctatcatcaagcctgattgggtgccgcccctggttgctttcaccactcataggggccggctacctcagggagcacccacttcaaacggcctgtttaacatagcgtgtcgcgggctcgacgccaatctggctgccttcgcacagacccgcggatttgcgtatacaaggtacgcagacgccgttatcatatccgcgaaggtgcccctcccaacatctttacaaagggagatcgaggcgaaaattcgcacccatggattccccctggccgcggaaaagactggctatacggagcctcgttacgctcatccggtgattatggggatagccgtagtcgccgggaggttgagagtgcctcggcgacagctggatagagctcgagcctttttgcatcgagcaaggtacgaccccgctattcccatgaaagtggtcgagggggtcctaggcaacgttcgcggtctgttgggtggcttaccacagagactccttaagccatatcgggaactccttaccagtagaaatctgtgggtccatccacgtaggcgcaggctcgctcctcctcttacgccgagcacatcttcccccccatga

SEQ ID NO: 14427 - RNA, 1224 nt, synthetic construct
  source 1..1224: mol_type = other RNA
atgagggataaacgccaactggggatcttcattcccggcttcttagatgactccatgttgaagttggcagtcccacagacagcgcggatgatcggctacgaggagaagcatttgcccttcttcagcagaaccctacgacgtgtgctgagcgaccctaatgcctatcggagtgtgcagatcccaaagaggctcggtggctatcgaactctggatataccaaatcatgatctcatgcaagttcaacggcgtatccactcctgcattcttgtcaggcgctatgtcccctcccccatctgccactccttcgtggggaaactatacgatcggtctggagctgccgaggagaggtggcaagccggacgatcaatattcaccaacgcatttgctcatcttgcaccaggaccacgcgccaggagggacgtaagaataccatcgtctattttaactgtagatctgaaagaggcttacccttccatcgctgcagaccgcgtgtttcgcgtgtatcaggaactgactggcgatccttggactgcacagattttgacacacctctcagtgtggagaggctgtcttccacagggggcccctaccagtcccatgttgcagaacctggtgtaccgcgagctggacgtcgccttggcaacggaatttaacaagggtccgtttagactgacccggtatgccgacgactttacactgacgtctctcagggggtatatcgaccctaagatcgtaatccaccttatcgaagtggttgaggctcacggattccctgttaacagacagaaagtgctccggtggagacgaaaagatcgtcgcctgagagttacaggaattaatattaggcgcaccgccgagcggccgttcagtttacccaggaagaagctggagcagctcagagctgcgcttttctacgccgtgaagaccctgcagagcactgcgcggtacgaggctgaaagaagggccgcaggtacactggacaccacgacagccaaggctctcgaccaacttcagaaacagacctggggccgtattcatggcctggtcggctttgccgtccaggtttacggggatgaactgcccccgaccatttacaaatggtttggcttcctacgcgaagaaactgaagtcacaggtgaggaactcctgcagcagataagagagagctttcctgtgtctgaggtgcagcgaagcggacgggaactgctcggggactcaccctga

SEQ ID NO: 14428 - RNA, 1101 nt, synthetic construct
  source 1..1101: mol_type = other RNA
atgcagcagagactgagcgacccttactgttacagggcaaagcaaattcccaaacgcctgggtggcctccggacaattgacgtgccatgcccaagactcaagaaactgcagaggaggatccacgatttcttgctgagacgtcattaccggccttcccgcatctgccactcctttgtggggaagttttacgatgtcgcccggcccgctcgcaaaaggtggattcccggcagatcactctttaccaatgcttgggttcacctcggagtgccgcccggtgtttctccacgcagcaaaagcagacgaatacactggagaataccgaggtctttgttctccgtagacctaaaagatgcttatccttcaataggagtggatcacgtgttccgtatttatcaggagcttaccggcgacccttggacagctcagatcctgtctaccctgagtacttggaacgggagcctgcctcaaggcgctccaaccagccctttgcttctcaactttgcatgtagggaattagacggcgctcttgcccatgaatttactcgggggccctatcgcctgacacgatatgtggacgacttcgtattgacgtcgacagaccctgagatttcagaagctactcgcgagagattcgtggcaattatcgagcagcacggattcaagattaatcaagcaaagacctgctattggagggataccgatcgagccctccgggtgacaggaatcaacctttttccccaggaacggcatatcgggctgccaaatgtcgtccaacggcagttccgcgcagccctgtactacgcactgaagtcactggagtctatccatgcctatgccctgcagagaggcgttttagacgagacaaccgccatgtccctaaggggagcggagaagcaggcctggggtctgatctacggggttattggcttcacctatcaagtctacggtgctaaaataccgcgtccaatatacgcctggatcccagagttaactgcgcgaactggggtcacttccgatacgctcgtggccaagatcaagaaataccctcccattgcggccatccagcagattggagaagaaatcatcggcagtagtccctga

SEQ ID NO: 14429 - RNA, 1149 nt, synthetic construct
  source 1..1149: mol_type = other RNA
atgaaagagttcgaaaacatagggtcaattctcaaggccatcgtgcaaaaatctatgtacaatgtgattggactgtctaacgccattgatctcgaaagagctctggaactggctcgggacccaaagaccgggtataggcgatttattatggagaagaaaagtggcggcaaaagacctattgatgctccgcacgatgacctcaagttcgtccaaaggatgatctataagaagatcctcttgaaggattttactccatcgaaaatatgccactctaccctggagcgttcaatcgtttccaacgcctatgcccatttaggtgtcccagccgatgttgtgcctaatccatcctacatcaccatcccgtggagagagccccagtccatacatttgatcgatctccagggtgcttttccaagcattaagaccgggcggatcaaggaaatttaccaggatattctgcacgatgagaacgccgcagagattcttactgagcttagtcaactgcggggaagccttcctcagggagcacctacttcccccctgttgtttaatttggcctgcagagaacttgaccgcgatctagaagaggaatttgcagacccaagactccctcttacacgttatgtggacgacatctcagtaacttccttggactcacgcgtgccccagaagaaacaaaaaatgctgcgcatgatcgtggaaaaacatgggtttaagatcaaggaggagaaggttgccaactgggatgtgagggacaagcctctgaacgtcaccggaattgcgttaaaccccgcaaaacgggcgatcttcctaccctacaaaacaagagagatatttaggctcttaatgttcaagagctataagacgctgtgtgaggctaatagcgagtggtttgagcaggagcgagacatcagcctgatgaagttcattacgcaggggaggcgccggtacaaacgagccttcggaaccatctgtggcgtggcgtctctggcattcatggtatatggtaaagacgaagcccccaaacgcacattcagttggttcgaaggctacgatggtgacgtcagcagtgctacattccaggcaatcctggacgacataaggaatggcgacctggtcggcgaaatttggggctacaatcagttttga

SEQ ID NO: 14430 - RNA, 1215 nt, synthetic construct
  source 1..1215: mol_type = other RNA
atggcaaagaatcccgaatccattggctcgctgttagctaacctgtcagctaaggagccgagggggagtctcctgaccaatctgctggcaaagatcagtctgcacgaaacagccaagttaatcgggaccgacgagagatccctcttgagagctctgagactggccaaacggcccgacggctacaagcgaaagtacattcccaagaagaggggcgggttcagacctgtcgacgcaccacatgacgacttaaaatgggtgcaacggtgcctgcaccgcaacttcctcagacgccgccaccatccgtcatccatatgccatagcttcgttggaaaatgttatgatcctcaagcggagttcggggagaaatggagagcggggcgcagcatcgtttcaggtgcctatgagcatatttgtcctggcgaatggaggcatccaaggtcactgttcagcgtggacatgaaggatgcctttccaagtgtgacagagaaaagggtgagcgctatctataaagagctgtccgggaatgagctcgtggcaaaggtactcactaacctgagcgtgctcaacaactctctgcctcagggagccccaacttcccccacactgtttaatctagcttgcagggagttggatgcaaacctcgccgaggagtttggtttagatggtcgttttgtgattactcggtatgccgacgacgtgacgatcaccagtgtagagcgggaaatcaaaaccgccgaccgagaacgacttgtgaaagtggtcgagggccacggattcaaggttaatcgagaaaaggattgttactggcaggactggagacacgtcctgcgcgtcaccggcataaatttggaccctgagaagcggcgtcttttcctgcccaggtctgaactcgatcgtctgcgcctgttggcgtttcacagccttcgggtgcttgagaatgaatctgccgcttggcttgaaagtaagtccagattcgacgtcccagacttcctccggtcccttgacaaaagggctacaatggccttcggacgcttgggcggcattgttggattttgctctatggtatacgatgagcaggagtggccatcacggctcttcggatggcaccccgctctagccgaatggtctaaagatgattttcacacgctgttgcagataatcaaagaaggtgaactagcaaaccctgattctgatctgtttgattttagcccctga

SEQ ID NO: 14431 - RNA, 1266 nt, synthetic construct
  source 1..1266: mol_type = other RNA
atgaacattaaaaagctgaggaaggaagacacaaatctgcagcagccatctttgggaatccagagcctcgtcgagaagaccttaggaaagctggcactcgaggagactgctaggttaattggggtggatgtttcggacttggtcaaggcactcgagatagctaaatcatctgacggctaccggcacaaaaagatcctgaaaaagcgcggaaaaggctataggcggatcgacgtacctcataaagatttaaaatgggtccaacgggcgtgccacattaatctcttgcttcgccactttaaacctactcccatctgccattccttcgtgggacggagattcgaaaaggactctcttcactggatttttggcaggtctgtcatcagcggagcctgggctcatctaggcgttcccccagacgaagaaccagaccccaagagcaattcaatcaattggagaaagccccgaagccagctggccatcgactttaaggatgcctttcccagtgtgtcccgcacacgtataaaggagatcctgcagaagctgctcgagcagacgggtaaatatcaggcaggtgcagacattatcgctgagatacttgttgacctcaccacctggaatggcgtcctcccacaaggggcccctacatcccctgtgctcttcaacctggcctgtcgagatctagatgaaattctgatcggggaattctctgatgaggagcaaaagagtcgcatcaagatcacaaggttctgcgatgatatatccgtgacgcgactgtcaaagaaaattggcctgaaaacccgaggtaaaattgagaggttgattcataagaacggcttccagatcaacgaagaaaaaactgtgcactggcaggactcccaccatgtgttgcgcattaactcaatcaatctggatcctatcaaccggcgtgtgttcctgccgcgggagactattgagagattccgctacctgctttatagatcttggcaggaacttgaagagtcattcagttggtggctggtgcttgggcgtgactccgataacaccataaagtattttctgaaccaagccgcgtatgggagaattgccgggatcgtaggttactgtagaatgatctacaaggaggatagcgaaatgccactcagactattttcctggaatccggacttgagcggctactgggaccaggagaggttcgagcaaatctttgctgatataagcaaaggaagtctgattcaggatctggaagaccacttacactacttttga

SEQ ID NO: 14432 - RNA, 1212 nt, synthetic construct
  source 1..1212: mol_type = other RNA
atgcttcatcaggctatcggccatgtggccgacctcattggtttgcgcaagagggacgtaccgttcctgaagactgtttatgaacgggctctgaaagacccctacgcgtatgaacccatccttattcgaaaaaaacgtgggggctacaggcgtatcgatatacctaacaaaggactcaaatacgtgcagcggtgcatccaccaccaactcctggtcaggcgatacgagcccacccacatttgtcactcacatattcggaagacctatgacgtagctcaggagtatggagacaggtggttaccaggccggaccatcgtgagcaatgctttcgcccaccttggcgtccctcctgacgtcgatcctcacgaccaatacgatgacgaaaggataagatggcgcacaccatgctccctgtttgccatcgatctaaaagatgcctacccttctgttagcgaggacatggtgttcgacgtgtatggcgagttggctggtgacccgtggagtgccgagatactcacacgcctgtccgtgtggcatggctgtttaccccagggcgccccaacgagtccattgctgctgaactttgtccttcgagacttggacgcggcaatcaaaaaggagtttcgcccacagcacttctgtgtgactagatacgtggatgacgtagttctcacctcaaggcacaagaggatttcgttacggatccagaagcggcttattgacctggtggaagcatatgggttcaaggtgaacctggaaaagaactgttactggcaagctgatcggcatgtgctgagagttacatctgtcaatctatatcccgaagaacgcagagtggcactcagcaaaaccgttgtcgagcagtttcgctcactgctgtatgggttgtttacaggactaagggcgaatggatttctcctgcactccaatctcgtggcagacgccttctcccgagctctggattgcgaggatcctagagtagccgagatccatggcatgagatctaaacagtttcacaagatgatggggatcattggattctgccatcttgtgtatgggaacgagctgcccaagcgtctgagtgcatggggggacagaggtggtggagatgcaatggatgttgaatgggccatcgagatgattaaggatgggtacttcgatactgatgtgatagatgcctcttacgacgccagcggctaccgcgtcagatga

SEQ ID NO: 14433 - RNA, 1167 nt, synthetic construct
  source 1..1167: mol_type = other RNA
atgagaaaggaggtgcgtcagatgtttcccaagagaatcggagccatcgtcccaggtgtaatgagggaagccgttctcccatacttagcccaacagctcgctatcaaggcagatatgctacgtgaagcgcttgaaatccgcgcacggcctatggtgcagggtgacctggagtctccctacaggcggtaccccaagaaaaagaagaccggaggcgttcgatggatcacagcaccacatgaaaccctgaaaaaggtccaggctgctatctataagcgcctgctccgcccacgctacaaaccaacaccaattgctcacgggtttattagaggacgggggatcgtaacgaacgccgctgtgcacatccaagggggcagagaacctcagagtgcattgaatattgatctccaggatgcctttccttctgtccgggcagagagagtggttaaactgttccgtaagctgaccggctccgaggagctggccttgactctgggatatctgactacttggaagaatgaacagggacagggcgcgattcctcaaggggctcccagcagccctattctgctaaactcagtgctgcaggagttcgacgccgagctccttgagctggcagggaagttcgggttggtggtgactaggtatgttgacgacatcacattgagcggacccgacgcccgaataccggataaagtctttacttatgtggctaggctggccaaaaagcacggtttcctccccaatatgaccaaattgcggtggcaacatgccaaccggaaccctattgaaataacaggcctccacctgataaaaccttgggtaggtgacttagaagtgaggcttccagctgctacacggcgcagatggaggggcatcctacacaacctggcagaggtgcccaccgacgcctttggcaagcctgaggtgggccttggggtgggaatcattggcgtcgccagacatgtccaggccgtcagttccaatgccgcgacccgaggccatattctgccgtacgaacttagagctccggcatgcgagttggccctcctggatagggttccctcaattgagacgttaagggaccccagagcgtggcgcaaattccagcagaaacaccaggagtcgatacgacggttcgaactggcctacgcagatcgccaatcctga

SEQ ID NO: 14434 - RNA, 1122 nt, synthetic construct
  source 1..1122: mol_type = other RNA
atggaaacggtggtgccttacgtcgagcagctggagttcgacttccccggagttcctagacgcggaccaggacgcgtgtttgtggtaccagataatattaagcagaagatagagtgcgctagagattttttggtgggacgtctcagattgccttaccaggagatggccttcgctctgaccctgcccaatgcatgctggtatgagattactaagaaggtaggcgacaaacagcgcaccttctatgtatctagacggccattagctgagatgcagcgccgcatcgccacgtatctagaagattcttccaaatgggagcgatggtcgatgagaaaaaggggcagccttcatcggagcgagacagatttagcctccgctttccggcgaggcacaagcatcatcacaaatgcctggccccaccgggttaaccggagttcactgaccctggacctccgcgatgcttttgagtcaattaccagaagacacgtggaaaggtatttaacccgaatctttgctaacaacatcactcaccccgtccaaagccccgaagtgactgcctgggttcttagtcggcttgttacatgccgcggtaaactgcggcaaggccccccatcctctcctgcagtcttcaattgtatgctggaaaggctcgacgacgcgctggcagaagctaccggtgcaccgaaaagggacgtgatcatgcccgccatgtacttgggcatgagattccagcgttaccgggagctggatgcatctgataggaggtcaggggcgagttacgtcgcacctcgaggggtcctgtatacaaggtacgccgacgatctttgttttagccacccggacgagacatttccaatagccctggaggagatgatcagaaaggtggtggcttcccatggcttccgtattaatggggccaagactaggcatggacgatacgggatactggaatttccgggggtcgtggtcgcaaacggccatctcaggcctaagacccggctagtgcaagaaattctcgagggagtttcaattatgactgcccaggaacgcgccgggtatcgtgcgttcctgcaccagttcggcccatccggtagactcgaatgtttgagggtgtttgacaactga

SEQ ID NO: 14435 - RNA, 1053 nt, synthetic construct
  source 1..1053: mol_type = other RNA
atggacacatcgaggggcatcgccgcaagagggcacgtagatgcatgcctcgcaggcctgaagatgtactccctagatccagatgttgtgcttgacgtccttctgcggcccaacgctcattggcagcgcgtcgtgaaggagaaacggggcaaacagagggtatgttactctccttccgatgacctgagaacgcttcaatggcgtctgatcaggattctggaccgcagcatcaagttccatcggggttattgccgaatctgggaccagcgttatgccttcaccatctctaagccccggttcccacagaccggatggtggaaagggtcttcaattgtcgccaacgctagggttcacaggcacagtaatagtgccttggtgtgtgacctgcggcacgccttccagagcatcaccacaaggcacatacaatcttttcttaacagaacccagccctttagaattcgaagaagaagggacgcttcctggacttacttccctgaatccttaatgtgggtggcctcacggctgttgacatactacgggaggctccgctatggagctccggcaagcccgattatgttcaattttatgatagaccgactggctgtagacctggccactgctgttaacgctcccctccatgtgaatgaggcggccctccgctccacgcaacgaattctcatgaccgtgtatggagacgatatttgttttagttgcaagagaggcgccgttccagagagcgtgctctggagaacagagacactggtgcgccaacatgggtttcgtatgaaccacgccaaaacactccgctcagggaatggagcgttactgttacctggagtggtcataagcgcacacgaagtgcgcccccgcgatacctacttggatccattggccaccgcaatccagggcggcgaacttactcaggatcaggctaacgggcatctaggtttcctgaagccttttaagaggccaggtcgacgggcgttgaaacggtggggtcctactctgtatgcccagctgcaggaaagagcaggcgtcactatcaatgagtga

SEQ ID NO: 14436 - RNA, 1005 nt, synthetic construct
  source 1..1005: mol_type = other RNA
atgttcgtggaatccattatttggagtatggccgaaaacactaccccaagctttgataaagagctagtgagatatcggaataccatctcaaggttggttagtttagctgagcgggagaggtacctcaagccattctatgtcaagaaaaagagcggaggcaaacgacgcatagtgcccgctactaaggacctggtgtacgttcaaagcatacttgcatcttggttcgtcaaaacatttggtggcagcgctgattactgctatacgggcaaggggatcatccctgctatcaagccacatcagggtgccaaaacagcattggtggttgatctgaaagacgcatttgaccacgtcacaaaggagaagatttacaagctcctggagcgccggtttcgtaagatgtccaaagaagtcagacttctcatagcaaccctcctgacctacgagggcaccactcctcaaggatgtgttagtaccccttacgtatttaacgctgtggtggaccccatggacaaagacctgctggccatcctgggaaactttccactgagggcgtatacccgttacgcagataacatgtgcttctcgttcgataaaccggtaaatctgtgggccgtcgacagagccgttgccaagattatctcaatgcatgattttcaggtgtcttggtcagccggatttgaacatatgcccatctcctatcttggcactcacgtgtacgaagacagactggaactcgaccccgataaactggacgcctatgtgctcctcttaaatgaggctttgtccagccctacacccgaggtgtaccgcaaacagattctggggattctgacctgggtgtctcaggtgtataagacgactaacccagaaaagttgtccccggaagatagggcgaagctagcctatttcatcggtcttttccagcagtacttcgggaaggtacgcgggacacctgagttactggagcggcttgtcacatcattccacaattctcgaatgttctga

SEQ ID NO: 14437 - RNA, 1233 nt, synthetic construct
  source 1..1233: mol_type = other RNA
atgacgaagattctgcagagtgcctgtaacccactgcagaccaaaggtgggctggccgctgcatactatctgcggaattttctgggctacaaggacagcgagcacaaaattaacttcctagagctccttaggagggccatttatcggaactctaacctctacagcactgccaggatcccgaagagaaacggcaagtacagaatacttaatatcccgtgccatgaactaaagatcgtccagcgcctgatcaacaagaccatcttgcagaaaactcgcgtcttaaaatgcacgtttgggttctacggagggagtggccttgaagccctgaaaaaagtggttaaacctgagcaggccattttttcagtagatatagtggacgccttttccaatacaaccgctcgggctgtgtatcacgtattccgacgactgaaattcgggcatttcgcctcttactatttgacctgtctcacaacctggctccatcccacaagatcgttctcacagactaaacgtcagagcgatcacgattttgcgcatgataggtccgacgagttgcacgcattcttatcattcgggggattcaattttgccggtaaggaagctaaattgcagcaaaatagctttgtgctgcctcagggagcgcctactagccccagattatttgacctgtgtttttggcagctggactacaatctggtcgtgagggcaatccacgttaagggatattacgtcagattcgctgacaatctctactttagtgcccccgagttctggcgggatggacagatagatattaccaagaacaacaagggcgctctactctttcactccccactgatttcatccatctatgatattatgcgagctggttatcggatatggattgaaccctttcaaaatatgccacgctacacccaaaagtggtaccagatctataagctccataaggccaggcttctgatgccagacgataaagactgcctgcctgctctcggctataacgttttccctgatggcacaataagaaataagcgtcgcttcgtgttgcgcatcaggatgtctgtgttcaacctgagaaaggcgctcgaatccggcaattatgaggacacatggcggatttaccagaaattgcagggtcaaatgcaattcgcaatccacgaccagctgccaccccgccttttaaagcaggcaactgacctgctttctcagatcaacagccagcaagcaatctga

SEQ ID NO: 14438 - RNA, 1131 nt, synthetic construct
  source 1..1131: mol_type = other RNA
atgttgaagtcccgcactcatattaagaacccactgcttaaaatcagcgggaggaaggccgcttggtacctgttttcgactctcgactacccttttgacgacttcgaacgttttcgtaaaatcctatgggctgccatcgtgcggagcccatggttatactctaatatcgcaataccaaaacgtgacggaagcaagcggattcttgcaattcctcaccccgatttaatgaccatccagagagccatcaacaagaacttcctcgaactgtatcgacatcctaacgtctatggtttctccggaggcaacgctcgggaagctctgacagcgttggcccggtctaaccaggccatatttgcctctgatatcaaagacgcatttccctccactaccggaagagcggtcttcaatttctttaggacagaaaagttcggctactatactagctattacctgacctgcctcaccacctggtttaatcaacagaaaaagttcaaccttccccaagtaggtctgccgcagggggcacctactagtcccagactctttgacctgtgtttcatcaggtttgaccggagattcgcccggttgacaaagaatgccaatggggtgtacttccgctatgcagataatatcttcctgaccgccgaggagttttggccagagaggattaacattcagacgatgagggatggcggggtacgctggcaaagcccgatcattagtgctatctaccgaatacttaagagagggtacgagtttgaacattctcccgacaatgagatttggcacaatcaggagtatggcctgcacaagtcatactttgcaaggcagggacaaattcttcatgccctcggactaaacattaaagacgatcagttacacaacacacgagagttcaaactgagagtgcgcatgaccatcttcaatctgaagaaggctctcgaacaaaaggatgattttgagacgaaaatctggcctttgtatcacaagctggatggcatgcagaaattcttggtgaaagagacatcatccaagctgtgggaggaggctgaacaggccctgttccaggttgcgctcatacgctacagtggtcagggcggccgctacgttaaaaacatttcagaatattga

SEQ ID NO: 14439 - RNA, 1254 nt, synthetic construct
  source 1..1254: mol_type = other RNA
atggctcatcagccaatttacaaccccctgggtaacccctggggtaaagcagctgctcactggttgcattggcagctggcccttgaagaggacgatattccttgggatatgtttgcaagcatcctttggcttgctatcgagcgggacccaggactttattatcgcaaacgcaagcagaagaagtcaggaggaacacgcactctgtgcgtgcccaacggagatttgaagaggattcaaaccaaaatcgatcagatagtgctcgccgctgaaccgagactgccttatgtgtatggctttggggggggctcagtggcccaagcattgcagccgcacctggagagggggtaccccatctttaccgccgacatcagggacgcattccccaatacgcatgacatggctgtctacaatgtgtttcggcgactaggctaccggaaaaacacagcctacctgctcacccgactctgtacgtggcctatcaatagccagtggcgagccgctctgccacaaggtgcacctagttcgcccaggctattcgatctatgctgtcgccccctggatgtgaaactgcaccagctcgctgcaaatgttgacgggtcctataccaggtatgctgataatctgttcttctctgcgagaagcttcagtgcccgccagtaccggccagacgaaaagaagagatacagaggttctgcctggccagaacctcagccgctgtggcagacagctccaggcgacgatgcggcagttatttcatggcacgccaccctcatttctgccatatatagacgctgcaccgacggctatgagttacctgaactccctcgtaaagtgtaccgtcaccactggtcctggctgagaaagtgttggatccacgtaaacccatctaacactatttccgatcggcttgagtaccagttacataagacatacctctggcatccaaaacagggacacgcgttcaaggcgctgggcttgcagataatcgacggacggctctgcaatagcaggaggtacaagcagagactgcggctgctgactcaccacgtcagctggctcctcgatcatcatcgtgattttgagactgaggtcgaccctgtttatctgcaacttaatgggctgctgcagtttgcagtaagagagacattgcccgcccctttgttaactgccgccgcagccttatgtcaacgcgtggaagacatcaggtattccggccccagtcacacccgagtccggcatattaacgcctactga

SEQ ID NO: 14440 - RNA, 1167 nt, synthetic construct
  source 1..1167: mol_type = other RNA
atgaacgacaaaaaatccccgctcgagagacaaagtggccagatagccgcaaagtatctgttcaagaagttgaaataccccttcaaggactggcagaaattctgggatcttattcggctggctgtcgagcgagacaaaaatttatataggcagatctccctttctaaaagggggggcggcaaacgcgttatactcatcccttgtgaggagctgaagtacctccagcgcctgatttcccagagacttctggcagacatctcaggtcatcccaacgcctccgggttcagtgagggtagcatccgcgaggcccttctgccaattgtgcgggccaagcaacccattttctgcgcggacgtaaaggatgcctttcctgagactacattcggtgctgtgttcagcgctttccagcgatgtaagtatggatacaacagcagctacttcctgacatatctaacaacatggaggacgtaccagtcactcttttataattctgcccttccacagggggcaccaacctctcctagattgtttgatttgtgctttgaacccattgacaatgcgctggccaagtttgccgccaagatcgggggagtttacacccgttatgctgacaacatcttttttaccgcgcctaccttctggcctgctcggaaaagttgcagaaaagtggaaggggaaaccatcgtcaaagataaacatggatttgaaacgtactacccttacaagcgtaagataagcaccatccccgaaggaaaggctgatatcgacaaaagtgattcgggcgctttaaactggcactcaccagtgatttctgcaatttaccagattgtgcacactaagggcaaaggaacttactatcagctacacaaatcctacctatgtgacaagggccaactgttgcacgccctgggcctgaatctgatcaacggccagctccataatacaagggaatttaagaggcacctccggctgaccatttttaacctgcaaaagagcctgtccgcacaggacgatttcggtaataaaatctggccgttatatcagaagctgaatgggatgatgcagttcgccatcaaggagactttgccagtgtctctggtccaacagtgggaagagctcgatctcgcaatatatcaaattcgctatcccagaacaatcggaacttga

SEQ ID NO: 14441 - RNA, 1101 nt, synthetic construct
  source 1..1101: mol_type = other RNA
atgtgggaaaataagcagaccgggtctattcggcacgagtactacgaaccggaggagaatgtcgccgccttagtatggcttagtaaggagctggggtacaaaattgtcggcgaggatgtgatttactctctattggtccagctcagggtggacaagcctgagcagaaccccctgtaccacaccattctcaaaagaaagaatgacggaactatcagaaagctatatagccccctcgatgaattaaaagaggtgcagtaccggatcaagaggcgcatcctgagctcctaccaggtgtcagacaacgccttcggatactccgggggaagtgtctttgacactcttcagccgcacctgcctacagacggtgagcaaagaattatgttccaggccgatatcaagaacgctttcccatccgtatctggcgaaaatgtgtttcttgctctctatggtctgccttcgagcgaatcttatgaacattatcgcgagaagggctacctgtcctggcatgttgccgctatgctgacggagttgctgaccatttatgatggatggagcggtttcctgccacaaggtgctccaacatcccctaaactgttcgacctcgtgtttctcggcattgacagaaacctttcccacttggcatgcaacgttggcggcgtttacacacgtttcgcggacaacatatacttttctatgaaaggggagtttttccccgaggtcatctcccgtgccataatccgaacaatccaagagtgtcgcagtcgagacgattatctgttcgatgcacggagattttattgcaaaaaggtaaaggtgaggcccctgaacgttgaatcattgagggcattgggcctcaacattataaacggggaaatccacaatacccgcgagtttaaactttcaatccggaagagcatacaccatatcaattggctcctggcaaattcagatacccccgagtatagcgccaaactggaacatgccatcaatgtgctaaaaggacagatgtcattcgcggtggaggaaacccttccagaagctctgctgcaggactattacagcttaagtactactctggatgggtctgtgagtacgatttga

SEQ ID NO: 14442 - RNA, 1116 nt, synthetic construct
  source 1..1116: mol_type = other RNA
atggtgagccgcatatttagcccatgccccgacatcgtttcggataacgaaataccagccattatctggctgagtaagaccttagggaaaccccaggacgatgggtccgtcctggaaattttaaaacgaatccggcagggcgagacactgtatgaggaggggttcgttctgaagaggaatggcaagttgcgcaaaattcttaaaccagtcccggaactcaaaaagatccaacgcgagattaacaggagagtactgtccgacctaatcgtgcaccctaatgtctctggattctctggcggtcagctgcacgatgccattcggcctcatctgaacgcaaagagcattttctgtaccgacatcaaggatgcctttccctcagtgacatacaatgacgtctttcgatgcctcactaagggacgagaatacgagttgacttatgatattagcgattcttactacgtgtatgacgaagaatgggacgacttctttccctgtattataggcagaaaacgtttcaagatactgaaccatggatttctgtcatggtacgctgctcagattgttaccgaaatcgctacagccaaggacgcgtacggaagactgagactggcacagggattccctacgtcccctcgcctctttgatgcccagatggaaccaatcgatatcaaactcactcatcttgcacaaaatgtcgaaggggtgtataccaggttcgctgacaatattcacttctcaatgcaagaggaggagtttcccggggaggtggcacgtgccatactcaagactattgagggaaggggtaggaacctatggagtaacaaatacgagtgccacaaaacacggagtttcaaaaccgatggccaggctgtgaggatcttaggcttgaacatcattgatggcaagatacataatacgagagcgtttaagcgggccgtgagactgtccatccaccacgttaagtggttccttgagcgcggtatcatcgacaccgaggagtttgaacatgcctatcggaagctgaatggccagatggggtttgcagtgccggagacattccctgtaaaactccttgacgattacagccagatcaaaaagacttataaggacttgtga

SEQ ID NO: 14443 - RNA, 1227 nt, synthetic construct
  source 1..1227: mol_type = other RNA
atgggtatttacaaagaaatcgtgaaagaccttgtaattgattacaaaaagcgaaatccggactggacagaatatgattttagcgagcacctggtcctccttacgtaccgggccgggaacaatgctgtcctgcccgatcctttggcagacagcgaggaggcctggcaagcaacactgaacagtgaggtccctgtgaaaaacgatcctgtcgagacttttctctcttccttcaggctaaatcaagacggagatgagcggattatcaaaatcgttgagcggtcaacattttactggctgggtaaaatcttccgcatgcacttcctggaccttatgaatctggttgagaaaatccgcgttaagggctggtccaacttttatagactggagtggcaggataaaaaggggggaggcttccgccagttgcagatccctaaccgacaattgatgggaattcagactaagatcaatgaaaagctcctccgggatttacccaggtacccccaggccttctgtttctctggggggagggtgatcgatgcccttaggccacatttgaagttcggctctcttctgaaactggacattaaaaaggcttttccctcaataaccgcttatgacgtgcgcagaggactgacctttggccgtaagatcaagcccgtcgaaaagctccagaacattgaagactacggtcacttctcctggtatctagctaaaattatctgcgacctgtgcgtgacaagctccttgccacagggcgctccaacgagcgggaggttgttcgatctcgcattttaccctcttgacgtggaactctccaaacttctgaaggcggcgggaggaaattatactcgattcgcagacaacctcttcttttcagtatctgaacggttcttcccaagtgagctgaagaacagcattaagatcatcataaccggcgagaagaggaactttctaaagctgagataccacaagctctggataaccaataaaagatatgtggccctgcgcgccctcggcctgaatactctgaatgggcgtctgcggaacaccaaggcctttaagagtcgtttacgcaaagccatgcatcataaacagagactgtcggaattgggcctagacaccgaggccgctcagcaaaagataggcgggttaatgggttttgcagtgaaggaaactttaccgaacaagctgctgaagaagacagagcagattaaaaaagatagatga

SEQ ID NO: 14444 - RNA, 1089 nt, synthetic construct
  source 1..1089: mol_type = other RNA
atggacagaatcccctggagtgagagcgacatcgaattcgccttaagcctcggaagggacacagaagagagggaggccaacattgaacagtacacgtccgaatggatgaacgagaggactgagaggattcgtgggcgggaaaccgcagcttttctttggttggcagctaggattggcatgaaacctaaccgcttcctgttcgccgtcgcagggtttcggtcaggctcatttggctatacaacacacttcgtgactaagagagacggaaaaggcaagcgcaaaattaccgccccccacaaggtactcaaggcagtccagcgtaaaatcgcccaggagctgttctgggatcacccaagatcccctcattcttttggcttcctgggcggaagctcagccgaagccctgcttccacatgcgaaaaatgctagcctgctgatggtggatgttacaaatgcgttcccgtccatcgagcgggacgtcatattccggtggttccgcaagcgcgattatagttggagagtgtctggtattttagccgatttggctacctttgagggaagactcactcaagggtcccctctctctccgcggatcttcgaactgatgtttgaatggatagacgagaggctgagcagactggctaggagggttggggggacgtacactcgctatgcggataatgtgttttttagtatccccggtgcacacatggataaaaagctcgtgtggaccgtgcttaagaaaatttggcggatggaccttatctgccaagtccctcgggacaagagataccacccaaccttcgatacccacaagctcagggtacgaactctaccaggcaatgctgttcatacactcggactggtcttgcgggacggggaggtgcacaacacccgagattttaaacgcactctacgtaagagaatccatcatgtgagatatctgctggagaactcgcgcgagacaggcgttattttgtccgcctggacaatgttgtgtggaacgtactcttacgcccgaaaagaaaccctgccccccaagctgatacaggaggtggaagagcttcgaggtcgaatccaccagttatga

SEQ ID NO: 14445 - RNA, 1098 nt, synthetic construct
  source 1..1098: mol_type = other RNA
atgattaataaccaagagttcgggtatgatccggagttcatgcttgcttttgtgcgcgaattggaggagaaacgcatagagcggggagatcagctgaggtttgaactggaggaggagaagcggtacattcgtaaaaaacagctgtacgctctgctctggttggcgcgccggatcgaagtgaaacccgagaagatcattgagctcttcctcgccatccaggagaagaaaaagatccacaatgtgtactttaagaacaaatcaggcggcggtaagcgaaaaatcatcgctcctataaaggagctgaaatatctacagaagcgcatttctacagaaatactgaagagatactccagagggtcagaaagctgctcctttgggtttatcggcggatccaccgcccaagccttacaaccccacctggaaagcggttgtctcttaatgttcgacattcgcgacgccttccccagcgtaaagcaccggcatattctggatctgtttagggggctagggttttcttggtacgtcgcttcgttcttagcagatgttgccacttatgaaggttgtctggctcagggaagcccaatgagtccaagaatcttcgaactcatctgcgcaaactatatcgaccggcctcttgagaaaatcgccagaaagaacgaagggatttatacacggtacgccgacaatatttttttttcagtgctgggcgatggcttcgacgaaagattgaaacgagagatcttccgtaatatctgtcctccacgtagttccaaccttaaatctccatactgccctaagtttcagactcacgaattcagggttaagaaactcgcgggcaacgccatacatgcgctgggactggtgattcacgatgaaaatgtccacaacaagagggagttcaagcgaaggtttcgcaaagctatccatcatgcaaagtggtgcctgaagaacaattatgacctgttgcccgaagcctggggaaaactcagaggcctattcagttatgcacagaaggataccttgccggcaaaattgaggtctgactacgagctgcttaaggacgagattctcaatctgggtattgaccttacgatatga

SEQ ID NO: 14446 - RNA, 1182 nt, synthetic construct
  source 1..1182: mol_type = other RNA
atggaagattgtgaaggatttagtgatgaggagttggacgacgtggagtattcggttcagctggcagcagagaatgaggagtttgaatggaggttgcaacgagagattcagcggaagagaaaggaaattccagccttggtgtggctggcgcaccagatgaagatcgccccggacaacctcgacactgttcttaatatggtaaggaacgatcagtccccctataggatgatcacactggataaacctgatggaggtaaacggcggatcttcatccctatagaccctctcaaacggatccaaaggaaaatagtgaaatgcattttgtccgactttcaaactgggccaaactgctacggattctcaggtgggtccatcgtagaagccatagaaccccatctccaggcaggcaccattttatatgtcgacatccgcgacgcttttagctctagttccgccgagatggttatgagctaccttacagaaggaagggtccccacattcagatacgattacaatgggaagtcatggccttattgctatgacgaagatggcgagagaggcctccactacgggtctactaggcgactcgtgttcgaaggtatgctgagagaaggccgcatgtcttggagtgctgctcgcataatcgtggatctgacgacatacccagtcattggatctacgtgtgtcctgcctcaaggagctcctaccagcccctggctgttcgacatggtgtgtaagaaactggatgagaagctaaccgcatttgcgcagaaagttggcgggaagtatactcgttacgccgataacatttttttctcaatggaccaggatgaattcccaaacccggtcaagaatgccgtactgcgcatgatccggatgtatggccgtttccggccccacaaaattcgagtgcggagaatgactaagggcgctgtgaaactgcttggcctaaatgtgattgaggggcagatccataatacacgcgagttcaagaggcgcctcagattagccatccatcacgtggagtggtttctgaacaatcgactgaaggacaccccagaattcgacaccgcatggcacaaacttcagggtctgatggcctttgctagaatcgataccttaccacccaagctcctggagagctactacgagcttgaggaccgtatttttaagataaactga

SEQ ID NO: 14447 - RNA, 1089 nt, synthetic construct
  source 1..1089: mol_type = other RNA
atgaactgggaggacgaactgtccgatcgctttttaagcaatggccatcagttgacgatgaaagagctggaagagcaccgcttgcaggacaggatcaagaaatctcggcgacgaattgattatcggaagaaaagtttcttctggctggggcataaactcgagctgccacactggctgaacctgtccgagatgctccagcgtattgatgtcgaaggatcagcctatttatacaaagaaccccagataattccgaaaccagaaggtggtacacggatcattcttagccctcaggctgacctgaagctagttcagacccggatcaataggctgttgctaaagaccttccccagacgccctgagacattcggctacatggggggcagctgtttggaactcgcccaaagacacctgggtatggcctccaccctcaagtttgatatcaaggatgcgttctttcaagtaccttggacaaatgtgcgcaagtccgtgaagggcttcagggggatagcacccgggttttcgggtagtgtatctcattggatcgctaagctgtgcacctactctccaactcccgaacacattaggaaccagtttggactctggaggggagccactagttttttgccccaaggggcgccgacaagcccaatatgctttcatctggcttgtgggcctcttgacgacgagatgactaaacttgcaaagaggttcggaggagtctggtcacgctatgctgacaattactacttttctatgccaacacctcagatctcaaacaagcttgaggagatcgttgtgtgtgaagcccggacgaagggattcaagattcacaaagtgagaagagtcaaacagggcgagttatgcagaatcctcggctacaacctgctagacggacgaatagccaatactcgtgattttaaccgtaacttccgcggcgcactttacgtgctcaggaccaaactggaccgagggctcgactatcgggatgcatatagcagagtgaagggcttcatgggcatggccattaatgttcccgagaatctgagactggagtatgattactgcaaaaacaagatcgaaaccatctga

SEQ ID NO: 14448 - RNA, 984 nt, synthetic construct
  source 1..984: mol_type = other RNA
atgagatctatagaacctgtaatcttctccagcggagagggaagatttccagcagaggggctcgaagtcgactataatcgttttggcttcaaccctctggtgtatctcggtttccttataggcattccaacccgatggatcgattacgttattaagattggggctgacaatttttacactgaggtgcggatccccaaaaaaggcggaggagtgcgggtactgcaggtcccactggatcccctgatgggcattcagcgccgcatcctgaggaaggtgctgtctcaattggagcccaaatcatcctgccacggctttgtcaccggccggtcgatcataacaaacgcgcaggtgcatgtcggttccacgcatatgctggttctggatcttgaaagcgccttcgaccaagggttatcaagccgaatcttcagggagctgtggggagaacgcgtcggcgaaagaagactggggttcttagtggcctcccttattacccaactgtgtactgtctacagcggcgacatcggggagagatatggctttaggcatctgccgcagggtgccccaacatctcctgctctcttcaaccttgcttgcaggcctctcgatggccggctcgaccactttgtgtggcggatcgggggtgtgtataccaggtacgcagataatctggcatttagtgtgcctagacagctgactccgaaggaagagcatatcattcggaagattgtagacgggagtggattccgcgttaatgacgctaaaacaagattaatgaggcagtcaggccacagtatcctacgcctcccaggagtggccattaacaacgggcgtatcattttgcccaagcggaaacgaaagcagttgagggcagccatatacttggcggcccttcacggagagacagatcgcctcaggggtctaatcggcttcgttgaacaggtgtacgggcccgaggttccccgacagatcattggatctcactga

SEQ ID NO: 14449 - RNA, 1017 nt, synthetic construct
  source 1..1017: mol_type = other RNA
atgcctacactcactggacgtcagtacgccgcaggccgaaaacttgctaggcgcctagatttacctcccgatcagctgttcctcgtgcttgaatatggtgcagccgctttttacgggagttacgcacagcctaaatccggagggggcacccgtatcattcacgtgccccacgaaccattggtaacaattcagcaagccatccttaagaggtacttctcctgtctgcctgtcagcccaattgctcatggctgtgttgcgggtcggggcattgaatccaacgccttcccacacagaaaggctaggtctatggtgggctttgatctcaaggacgcgtataaccaggcctcttttacccggagcttcatccagacctaccaccaccattatacaacgtcaaacggagaggtgatcgagagatggtgctcacagcggaagcagccttgggacattttgcccatggagctcgcggttctggagatcgtctcagatcttgtcgacatttatagcgattataaggaggtgctgccgcattataaactggtactgccccaaggagcccctacttcgcccgcactctttaacttcgcctgccagcgaatggacgctaggctggagcatctggcaagtaacgtgggcggagtggtgactcgcttcgtggacaatatagtcttctcttgggaaaatgatgaagttgaccgccccgtatatagcgccatccggcggattatcgagaagtccgggtttaaggtcaatgaaaggaagaccgtggccataagaaatggcaacagaaacggggtgccactgcgctttccaggcgttcatatcatagacggagatttgtacataccccggaaaaagttgagacacctgagaatggccctgcactgcgctgggaaagcccacaatgacgcactctaccaggggatcaaaggctacgccctacaggtcgaggctcaaatgccgccgcaattacgaggtgtgtacggtaaagcacgcgctgacaatccaaggatctga

SEQ ID NO: 14450 - RNA, 966 nt, synthetic construct
  source 1..966: mol_type = other RNA
atgtctctaacactggagattggccttcaagataataaacccgcaattaagtcctataagactgaactgagccaatatctgtccgacttgactcaccctctagaagtcctcgagatatcacaccgccgcaaggaacttaccgatatcttattagatttgacggaaaccacacagctgagtcttctgtgtgatgagtcagaaactctcgatcatttgttcgatgggctcctgcagctccgaaaggagaagaggccgctctacaagcggttccagaaagagatcaacggcaaaacgcgggacctggcagtccctcagaaacccctggacctcttcctaagaaattacgctggacccataatcaatcaggcagaatgccacgctcaagctcatggaggagaaaacaactggtctttgaccgagagcattaaaacacacctgcccataggtattgctctgtcctttgacctgtcccaggcgtttaagaacacccacctccagtacgtattcgacttttactacagcctgatctacaagaaaaccagagacaagaaaacttctactgacctcgcgggctttttagccacagtgtccactgtgtactacagggatggtgggtatgcacttccacagggcagcaatatagccacaaaactgtttaaccgtctgctgtatccaatcgacgagagcctgtcaaactacgccaagaaccgaaacttaacgtatacccggtggatcgacgattttatcctggccagtaaagacagagacaagaccaataaggagcttattgaggccactaatattgttcagccatacttccctctgtctgaaaagaaaacattccttcagagggataagcctgtgtatctcttggggcagaaaatcgtggattgctggatcacaaaggccacaaccaaggagattcaatcgaaaaatccaatgaagagtaccacccattatttgtga

SEQ ID NO: 14451 - RNA, 954 nt, synthetic construct
  source 1..954: mol_type = other RNA
atggacctcgctgtttgtgatcagtacaagaaggtgaagctgcaagttcagatccataccaaggaacttactgactatttgcactccattgagcattcactccagttgctggaagacactaataagcgcaaggatgtaactagcatcctcctggagttcactaaaacaagccagctttccctgctgggcgatgaagcaaaaaccctggacgtggtgctagaaaacctattagatctgagacgggccaaacggcccctctataagaggttcaaaattaaggtgggagagaaaatccgggacatatcagtcccacaaaaatctctcgaactgttccttaagtattacgttagccccctgattgaccacgccaaatgtcacgcacagagtcatggcggggaggtgggatgcacacctaagtactccattaagtcgatcctgcctgtcgagtttgtactcagctttgaccttaaggatgcttataaaaacatcgacctgcagtacatattcgacttttactatgacctgattttcgagaaaacgaaggatgtggagaagagcaagcagacggccggctttttggcgggtgtgtctacagtctactatgcagacagaggctatgccctgccccaagggtcacctatctgcagtaaattatttaaccgcgtcctgctgccaattgataatctcttgtacaaatactccctcgagattggccttgattacgtgaggtgggttgacgattttatatttagtagctccgattgcgggctgacactagataagttcgtgaaaaccttggacatcgtgagaaattacttcccgatctctgagaataagacctacttccagcgaaaacacccagtatatttgttaggacacaagatcgtcggtaccgatatatcagaagctaccactgaggaactcgaaacaaggcgtcagatcaacctgtcttga

SEQ ID NO: 14452 - RNA, 1089 nt, synthetic construct
  source 1..1089: mol_type = other RNA
atgcccgccgttctggaagaggtgccgattaatgactcccctctggtgctgggcgtcccaggacactattacagcttcttcggtggaccgttattcctcggaattcatgacgataaactcagggagcactacgaaaagattaagataccactcaacatactgagggatgatgagaaacgtcgcaacttggctgagctcttatcctcattaaatccaaaaccgggccttttttccggagagtctgacctagaggagctgttcccactgatcctggagcagaagcacttgtaccaaatctggaaacagaaggtgaatggcaaagagagaagtttttacgtacctcagaaggcctttaagaccctacttacgaactacgtgctcccctttgttaaagcagtacccgcgcatcccagttgtcatggcggagagaaaggctggacagtgaaaaaaagcctcgaatcacatcttcccgtcgtgtcaagcctgacttttgatatgtcagctgcctaccatcaggccaccatgaattacgtttttgagttcttttacgactctcttgaaggccgttgcaagaccgaggagcaacgacgggacgctgcagtgttcctgtccgccgtgtgtaccattcgcaaggactacgacgaaagaagagaagaatgcttcgaggcatctttgcccgaggggagcgccgttagcagtgctgtctttaaccgaatgctgctccctattgacgaagaattctctcggttcgccgagaagaagggtatcaagtattccaggtggatcgacgactttgtcttcacctcgcctaagaaacgcaagttcaaccacttcgagtatgtcatgcggaaggcacaggaatcctttacactggcacctagaaaagtgtttttcacttatgagggggtgtcttatctgttgggccacaagatcgcgtataatgaaatcgaaaagatcagtagggaggaattcgagaaacagcggggagaaccatatacaggggggatgctgagcgatacacacccttgggattgcatgtacgaaggttatgaggaaccaacttgtgatgggaacgatatacccttttga

SEQ ID NO: 14453 - RNA, 1218 nt, synthetic construct
  source 1..1218: mol_type = other RNA
atggaggaccgtatgtacgccccaagcggtagacggttccgcatctttgttgactgtatgagcatggggagccggctggacgtgatcccttcagagaatccagatctagaaattgacactgatggaacgccaactattttcctaagttctgtgccattggtgccgggggcttattttaccggcccgtggctgccgatgtcttatgccgatgagctagtcaaatatttttctgagacaaggaatcccctggaggtgctggagagcaagaaggaaataatactcaagaccctcctggaattactccctttggacaatcaactttctatgttggacaataaacaggagaggctggaggtgttgttagatgacttgctggccctcaaaggcgaacgaaagcatctgtaccagcgctggtcacaaaggatcaacgggaaagttagggacatttccattccccaggattccctcgaacatttactcatcgagtacgtaaaacccatcatcatggaggctccttgtcacagccagtgccatggaggcgaacagggattctcaccaaagaagtcgctgtcccgacacctgcccctgggtactgtgctgagctttgacctggccaacgctttcaagaacacacacattcagtatgtgtttgatttctactacacgctcttcgagaataaaatcgagaaccgcgaaatacggcgtgacatcgcaggctttctgacatccatcagcactgtatactatagtgatacccaaatctctgcgctgcctgtgggcagtcctatttccatctgcctcttcaaccggctgttttatccaattgacgaagtgctgcatatctgcgcccttaagaaggggttaagatataccagatgggtcgatgatatcaccatctcagcaaaagaaacaaaccggaatcctgaaaagatatgtggtgccatttcgatggttaggcgcgaatttcccatagcagttaataaggtgttctttcagcagaatgtccccgagttctaccttcttgggcacaagattatcggcaacagaatcaccaagatgaacaaagagaagtccaaagacaaattggtcccccttgatcccgagtgcattgctacagagagagagatagagtggattcacgaggtctacatgggcgagattcctcctaaccagggagaatgtagtctcgaaggacttgaagaagatctgccattctga

SEQ ID NO: 14454 - RNA, 1164 nt, synthetic construct
  source 1..1164: mol_type = other RNA
atgtccatagaggccgagatcaagtcgtgcaatgacgtcttcgtggaggggagtttttataagcacaaatacgaggatgagacatctgcaatactgctcaaagaaaggctgggcattcccgttgcctatttccgaggcccctggctgccgatgttttatattaacgagtgtatggagtactccttctctcttgattacccctcccagatcttggaaataccaaagcgcagaaaacaaattgtggatgctatgctcgagcttcgctccgcccagcagcaagcatcacttttcaacatcgacgagaagcaggacttggaaagcctcctggacaggctcctcattctgaagaataataataggcccttatacaagcggtggacccagaatattgacgggaaaaagagagaactgtccgttccccagaaggccctggacgtgctgctgaaaaactacgtgcacgacattatcatgctcgctccatgtcacccacagtgccatggaggtgagaaaggttggtctgtaaaaaaatctctggcgacccatacacctctgggaactgtgttgtccttcgacctcgctaacgccttcaagaacgttgacatccaatacgtgttcgacttctattaccggctgtttgagagcaaaataagcgatcctgaaaacaggagagacactgcggggtttctgaccactttaagcacagtctactataaagacaaggacagctttgcactacctcaaggcagtcccgtgagtatccctctgttcaaccgccttttttacccgatcgataagctaatgcaggagtcagctaccaagcgcaacctgaggtatacccggtggatcgatgacctcattatttctgcaaaagagagcaaccgtaatcgaaagaagttttttggctcattatcaatcgtaagagaagatttccctgtcaatttgaataagacattctttcagcagaacctaccagaatactttttgctgggtcataagatcatcggcaaccttgtcatcaaggtgagtaaggatgaagaaaaaaatcgtggggagcagattgacccagattgcttcgccacgcactatgagcgggaacacctgtggatcgaagattattacgacggcgatgagcctggagattttggagaaattaaagatttctga

SEQ ID NO: 14455 - RNA, 933 nt, synthetic construct
  source 1..933: mol_type = other RNA
atgcctgtgtacgaaagagaatttttcgactatgtcgagtcaaatcttcaccctaccggatcagtcttagccaatccctgccgccgaggaagtttgagacgtctgttgagcccggggacacaggaggacctgtttggagatcctctagaggtgatcctcgaacggctgagtggcgatattgtcaatcggaaaggtgggtatatgcgctggagggaaaagatcggagagaaagagaggatgctcagcgttccttccaagacactgtggaaatttctcgaagattatctggaacccttcattgaaaaacagcgtgttcacgggagctgccatgggggcatcaagggctggtccccaaagtcttccttagaatctcacctgccaatcgtgactgccctgtcttttgatatggagagcgcattccagaacatgcccgcccgaaaggtcttcgacttcttctactgttcactcaagggtattgacaactacgaggaaaggcgcgacattgcaggattcctgacgttcatctccaccgtgagatatgatcaacaacgcggcttgcctcagggctccccgatctctcaggctatattcaatcggttgatgctggaggtagatgagactatgttttgggccgctaccgagcgggggatgacatacagtcggtgggtggacgatttcaccgtgtcaagcccagacagacgggatgtcagagagtttctcggcgccgtaaatctgctcgcggagagatttcccgtggctcgtgacaaagtgtactttcaggagggggaacccgtgtaccttctaggtcataagcttgttggcggtagggttctgaaaaactcgcgcgaagagaggcttcgcaacaagactccaccactggactactataagtggctgagcaacaggcgagcatttgagccctggataaactga

SEQ ID NO: 14456 - RNA, 924 nt, synthetic construct
  source 1..924: mol_type = other RNA
atgaatcccaaggtggataggctgaatgagtattgtcgacgctttggtccggggttccgggtcctggatgatgttcgcaatgtgctcgttgattttctcgctggcctggacaggcagttggacctctttgaaagtcccgagcagcgggcccttagctccttagaagctctaagggtccacgacggaagcctttacaatcgctggtcttttagcgataaccgaaaacgtagagagttgtcagtaccttgtgagccattgaaggtatttatagatgactacctcatccctctaatcaagcggaccaaagtccacgagtgttgtcatggcgcggagcctggctggtcgccaagaagatccctggaagatcacctgccctgctattccgtgttgagcttcgatctcaaaagtgcattcaataactttacgatcgccgaagtcttcgatttttactattctctcgacctggaaggcctagaggaggacgaaaaaatcgccgtggccggattcctcagtatgatttcatcaagcctggtggatggacgacgcgttctgccgacaggagcttctcattctccccttctgttcaaccgggggttgttagaacttgacgatgagttatacgaagggtgctccagaaaggggttcaactacaccagatggctggacgacattacaattagctcacagggtaaagtgtgcatcgaagagctgctgggcgcagtggagctgactgaacgttatttccctgtcgctccaaacaagatattcttccaaaaggcagacgagcccatttatctgctgggccatgttatctatctcggtagggtgtgcaagaactcccggactgagcgcgacgcccacaaggtgaaaccacttgactacgatgagtggtttggagacagggggtacgagggctgggaatga

SEQ ID NO: 14457 - RNA, 954 nt, synthetic construct
  source 1..954: mol_type = other RNA
atgcttaacgaagtggtggtgaatttaagagacgaatccctcattgaagctgccggcgcggtgatcgatgccgctataacccctcgcaaccgtatctctaccttgtttcctgaggtagacgaggcctatcggccagcaaatctgtggcgagatgtcttagaaatgctggaccagggaagaagcctatacagtcgcttccagaaagccgacagcaatggcagggtaagggacatctcagttccccaagcagcctttctcgagtttgtgaataggtgtctgatccccctggtgaaatccgtgccaagccacccggcatcccatggaattgagaagggctggtccgctgaaagatccgtgaagacacacgttcctatacgtaccgcatttagcatggatatctcggatgccatacctggcgtgggtattgacaaagtttatgatttctactacgctctgctagaagattcaaagttcgggctgactgagcgggaaagagctggcgtggctggcaacttggcctacctgtcaacggtgcactatgcctctcgagggactagagggctggctgttgggtctggcctcagcaacactcttttcaataagctgttcatgggtattgacgtcgcaattcaagagggttgcaatcggaggggatttaggtacagtagatatctggacgacgtcaccgtaacaagtgaaggcgatgagtcaaacgaggcattcctggggatccatcccgttgtggcggcccatggatttcgcattagcccacgcaaaacattcgtgcagaaggcctctgagggtgacatctacctcctcgggcaggttgtcgtcaacggacgggcggtcatgaagaattccagggagatccgagaggccaacaagaaaggccggcttgagcccgagtacattgaacgggtcttgagctctggagattatagtcgctggatctga

SEQ ID NO: 14458 - RNA, 939 nt, synthetic construct
  source 1..939: mol_type = other RNA
atgatcatcgaacagcaaagcagcattcacattacacagtatctgaatcgtattatggaagaggaccacaccccttcctaccagaggatctggatcgataaatatcatggcaccaccatattcaatccacagcaaatagcggaactaactgtaaagcaaaaggaagagccgcgccgagcggaccagagatatgtccggactttgggtcctgatccaaaaaccaaacagtggtgtcagactcttaatgatctgttgctccaatcccgggagccacaccccaattcccatggcttggaaaaaggccggaacactagtacatacatagagccccatagaactcaaaagaaggttttgagtgtctcgctctacaacgccttctcttcagttgggaaaaaaagggtgacatctatcgccaggcacctgttaggaattgaggggaacgctgccacattctttggcgagattgctaccaaacacggaaaactgaacctgggcaaccctctggctccccagctgctgaatatccaggcctataaaatggaccgctatctcacagacttcgtgagaaagtacggcctagaatactccagatttctcgacgagcttacattttctagcgcatactttatacagaccgagactatcgcaaaaatcaagagaattatctctcggtgcgggtggatgatcgataatgaaaccgtgaacatccagagcggtaatcatttcattattgccgggcatgtagtcgtgcctcgcgagggtgtggtgcgagagaagaaggagcacaggaaggaagcaacgaacacgataccaagtatcaaccagtcacacacaaaccaggctaataaggccctgaagacccttaccaaccccagcgatcggctgtcacgtgagaagggactcattaggaatctgaagggattacttaaccgcaagtga

SEQ ID NO: 14459 - RNA, 1278 nt, synthetic construct
  source 1..1278: mol_type = other RNA
atgagtaggaaacaaaataaggtgagtaactcacacaataagtcgtggtccaactaccggcaagtttcatacatcaaaacatccgttgtccgccagatcggggtcgaggagctgaaacgaataaacaagcgcatcttcgtgctgatgaagcggagcgagggcttttttaaagaagaaaaggcccgaatgctggtggtaaaacaagcaaacggatacttccgtggccagaaggtgattagtcaggcagatcaacgcgctcttaaggcgactggcggtaagtatcgtgaggtcaccttcctcaaggacaaggcaacccgcaagatgctaaggaaagtcgctaagctcatcgatattccgcacgccgatcaggtgggttttactagaaagcgcagtatttgggatgcagctgcccgcttaggcgacgccaaatctatcgttaacatagacctcgaaaacgcatttaatgctattccagagcaggccgtctatttgattcttcggcgtgtgttcgacctgaacaaaaagcacgccagacagctaactaacgctattacagacggaggatacctgtatcagggaagccctttagctccccttattttcaatttgtggacaagaccaatcatggactccgtacggggagccggctttgatatcgtggcgtacgctgacgatctgacaatcggttctgactacggggctatcagccataaaatggttagggtgttcattaagtggataaggcagttcaatatgaacgtgaacatggccaaggtgaagttctacaacataaaaaaggcctacaaagagactgtgggtttgaagtccatccgctccggaggggggatactcacaacccctgtgaagtttaggaaaggcctgagaaagctcaggtacctgacacacctgtataccgttaatggcgtgacgcataccagacgcgtaaataaagaaggagagcccaatgagctggggttcgtgattttggggtcttggatttggctttctgaagcagaaagaagaggggtcgcgagagtggacactgcactgtataagaagctcaaaaaaagcgtgcccgccatcatcgaggactggaaaattaaacggcggtcttataatgttgatcaccagtcatgctttacgaccgatagcatccctcatatcccccaggatacccgaggcaagtggaaagtcatctacaccagccatcagggccgactgagggaaggcgtctataggaagcggctgtcagcccgagtacggaggccatttagatga

SEQ ID NO: 14460 - RNA, 1095 nt, synthetic construct
  source 1..1095: mol_type = other RNA
atggagttcaaagataccctggcaaaagggatgagctacacaaagcagagtatcgctcgttacaaccccaacgtcaatctgcataaattgggcgcgaaaatcgtggcttggcataacgccaataaaggactgagctactccatgaaaacaatgtatgttgtcaaaaacgacccgttaggacggttcaagaaaggcgcaaaacactttgagaaggtggatggcattacctaccgcaatatcaggttctacaagagggagacgcgggagaagctcgtggaaattctggattgtcttgacctggaacaccccaatcaaatcggcttctctagaggcaaagggataaaggacatgctgaagcttgataacataggggagaggaccaagataaagctcgatctgtctaacgccttcgataatattaccaaggagcagttgaaagccctgctggtgatcgtctttgagatcaggcctaagatcgcagaagaaattgcctcagcctggactgtgaacggtcacatggtccagggtcatccactaacccccgcagttttcaatttactgaccagacaagctgtagacttcgtgataaagtacgtaaagaattgcgggatcatccagtatgccgacgacatcctaatttggcacgacacacacgattacgtttcctggaagactattagaatggtgtgcaaagccttcaaaagagccggatttcctatgaacactgaaaaggagggcttttatcacaagggggcagaaattcagttcgtgggtctgcggtatcgtcgagacactgacggaaagtataaatggtttcccaaggagatgcgcaaaaacaaggcccgcctcagagcgtacaagcatctcaaagctctgggccacctcggtcttgatcataaggagaaaggatatactgaatggctgttgtttcgaaagcgcaataagcagaacaacaaacagattcaaacgcttaagggggagtgggtcgatttcgacaaggctgtggagacaatgctcaaattgtttccaacaaaggaagaacctcagtgggctgaatttaataggctcccaatccgggagtttttactgatttga

SEQ ID NO: 14461 - RNA, 1185 nt, synthetic construct
  source 1..1185: mol_type = other RNA
atgtattacaaacgagagaatcttgccactttacgccaggagctaattaggcatgtgggaatagaggagttcaataagatttcagcgactgtgcgaacaaagctggaaaatttcgaatactacagaatcggatacagcagtttctggatcaataagcgcaccaaagctaaagtcttcagcaagtccgaaatcctgaagtctaacgatgagcaccggcccattaaaagtcctaagaaagatctgaaggtcctcaccaaggagattaatgagctgttttccagctttacatccaaccgttattatataaagggattcgtcaaggatgaaggcgtacagaccaacgcagagtatttccggaaatacggcggtatcaaattcgggctgaacatggatctcgagaacgcatttaaccagatcgattacggcaacttgaaagatttcgggaaaattgttatggggtggaatgccaaagtgtctgaaaaatttgctaagttgctgactatcaagggtcagatggtgcaggggaatcctctgtctccgaccatgctgaatctttttgcaatacccatggacctgacaatcattgaattttccaagagtcaaacagcccccttactttacacgcggtacgctgacgacatgctgatcggcagcagaacaaaaatcgactttaagaccttcatcaacctcctcaagataattaaacagttcggctttaaagtgaagaaaaagaagaccaagttcatgaagaacaatattgagatcaccggtatcattctctataacggaaagagatggaaaacgaaacggggaaggaagcgtagacttgttaagaaaatccgcctgatgaaacatctccaatctctgggccttaaacacacaaagagattgaacaaagaaggcaagctaattgagatatcctgcgtgatttcagggatcctggcctggttatatccagcctcaagcaagaaaaaaaaaagtaggaagaaccggaagactaagcaaaactccaaattgaacaggaagttttcgaagaccaaacatgacaagtctctcgccaagcagaataagaagttttcaaaggacaaaaggcagaaagttgctaagaatgtagaagaggaatatcgcatcttctgtatgacaaatcaccacattctgcgccgaaatagcccaactactacctga

SEQ ID NO: 14462 - RNA, 1032 nt, synthetic construct
  source 1..1032: mol_type = other RNA
atgggccataaaccatgccggtcatgtggtgaaggcggctacgctgagaggcagaaccagttcaacttccagttgctgagcttcagtcacgtgaaactgaaccccaatagctgtctgagtgccacacccgtgagggtcctgggaatcttgacaatgttcacgcgaaagactgtctatgatgttaatcggatgtccggccagaagaaggcccgggaagtgtgcaatcctggccgccacctccgaacaatccatggggcattgcgcaggagcttggctcctctcgttagcgccctcgcttattccgccggatgccgcaaaggggattccccacgacgtcggcttctccgccacctaggtgacgttcacttctacctcattgacctgaaatctgcctacagggctgtccaactggctcccatggcgcgcatcctggctaggatttcccctagctgtctgttgccctctgcagaccaaagtggacagtataatctcccttacctgaccgagcaggagtcagagcgctggctgctgcagtacgcatttgatgacaaattcggagggttaatggtaggcgctccggccagcccggacctttttaacctttacgcgggagagatgattgacgcacccctgtcaaagctggccgcaagatatgggcttcgatacagccgttatctggatgatctgctattctcagcccccgccgataacccaataggtcaaaagaaacggagagccatcagaaggatcctcactgaagttgggtttgctgtgtccgaccacaagtctagactctgggacatacggaagggtccaatcgtcgtgaacggagtcggtctggatgtgtcgggccgtttttttgtgccaggcgcctttatgaggcggcttaacggaattgcacatttggtaagaagaaggatgctgcctatctctaatctcggcggcctattaggggcggtgaagaatattctgtctacccagcatcttaatagaagtcaggggaaggtgttagctgccgccgcatccacctga

SEQ ID NO: 14463 - RNA, 987 nt, synthetic construct
  source 1..987: mol_type = other RNA
atgtacaaaatctccgatttcttggctgagttggaacggagcgcctataccaagcccggcgaactgtcactccgcccgactttttccgagccgcctaaatgggaaaggtgggctatcagagacatcaacccattatctggtcaaaagaaggtgcgcatgctgactgttcccaatgaggccctccgttttctgcacaagggcctgatctacctgctgagggtgagcaagaaggcatctagtgcgcttcattatgcccgaggcgctagacctggatttagccaccagaggttagtgtcagagcaccgaggtaaccgcttcttttatgtggtcgacctgaaagatgcgtactcccaggtcgaccatagcctcatgattaagattgtgatcgagtttctacgagcaattccacacttcgaggccttctctgaggaggatgaagccggtgtgacgatattcctggagcgatacttccttttgccagaaattcctggcttgcccgtaggactcccagcttctcctgatctttttaacgcctacatcgggaccctggtcaattggcgcatctcgaagatgatatcagccggccactacacacattatctggacgacctggttttcagttttcgtagtagaccttccagaaaaaaaaggcgggagattagagaaacactgaagcagtggagactcccaatcaatcatgggaagtgccaattcaaggacttaaaaaaaggccccatcgtgattacagggattggactggagtacggcggaaggatgttcatcccccgcaattatactaggaagatagcaggactagtccaccgggcactggaaaccagggatccccacgagatagctcgcgcacgtgggatggtcgggcttgttttgcataccctcaaagtggcccggcaggtaccaaatcagcacgaagagaagcttctccggagctttcggaaactgcaggatgaccctgaaaacaacagatga

SEQ ID NO: 14464 - RNA, 951 nt, synthetic construct
  source 1..951: mol_type = other RNA
atgttcatcgacattaaggagtttctggagattcacgatgatcccagatttgacaagtacaccttgagggatgtcaaccccgtgtccaagcacatcaaaactcgcgaaatcagcaatcccaataaaagcatgagagaaatccataggcggataatacaggcagtgaaagacgtctaccttgattcatcgaatcacttcagtagtacacaccaaaatgcggataggcacaacagctcccgatttttctatcagaccgacctcatgcacgcttacgcctcagtgccgttagaggggctcgttactattctgtcttcccttaaaccaacatggggcaccaagaatgttagagagatcttgacaacctactgctttgacgagagcggagcaggtcttatagtgggggcaccggccagccctattctgtttaacatctacgcctggcagacacttgacatccctctgctagaattttggccatatatgaacgacgaaggtcaaattttccggaagttctacacgcggtacctggacgatctcaccttcagctctcctgagccaattacagattctattcggaggtccatcagacgagtggtcgagcaggcgggctttcaaatcaaccatcgtaagtcaacggtcagagatctgaaaaaaggccccgtagtaataactggcgtggggctggaatatcggcccaggcgatctgcccgtctattcctgccacgccactatttgaaacgcatgaacggactgctgcatctcgccctcaagggcgaccctcgggttagtcactctgaaatcgagggcctgatgggtgtgttctacggagtgttgggaagaaagcatcgccagtcccatcagagtaccaagctcaatgctactgaatcaaggttcttagagatgtatggggcttatcgtgctcagtatgagcgcgccactaaccgcaagtga

SEQ ID NO: 14465 - RNA, 927 nt, synthetic construct
  source 1..927: mol_type = other RNA
atgttcatactgttctcctcttttgtgaagggacttcccgggagggaggcacctggcttcaaattcttttttctacaggatcggaatcccctcgccagacggcgtaaacgcagacacgtcggagcgccgaatgaagcaatgtggcgccttcactggcgcctgatccaatggcttcgaagcccagggctcaatcggggacgcagatacagcacaggttgtggccacctagatagcccaaggcgaaacattctaaggcacagaggaaaccggtttttatacttactggacatcaaggatgcctatccaaatgtcaacctcgataagctcgctaagatactgtatgaactggccatccatctggttccggaggacaaaataaagcttttccttaagctgttctgcttctcacctaacggtggactggtggtagggggccctgcttctcctgagctgtttaacctgtatgccgaatccttgctcgaccatccactcggggttttttgccacaagcatggtattaccttcagtcgttatctcgacgatttgacgttctcctgtagtacccctattggcaaacgcaagaggctcgagattaggaagattatccttaaggcaggctttaacatcaatcactcaaaagccaaagttgtggacctgaggaaaggccccgtggtaatcactggcattgggttgaatttgaacggcaagctgttcgtcccaggacattaccgtagaagaatcgatgccgtgtttcacaaggcggctaaaaaccccaaagacctgaaatacttggcaatcgggatgcatggactgtttagatctgtgatcccccgaggtgagctgaattcccggagtgaactgcgaacaattaaccggttcaggtcgtttctgagcgctaatcggaacaaggaggccttaacccgctga

SEQ ID NO: 14466 - RNA, 999 nt, synthetic construct
  source 1..999: mol_type = other RNA
atgtcagagaaacaattgagcatcgacttcccgaccgatcatttcttgttgcagaataaatcacctcttcccggatacaaaacggaagaaattgtaacctattcttcttcaggtaaacgcaaggttcgggtcatatgtaaacctaatgagacgctgcggattatgcacgacatcatgaaggaggtcctgtctcccgtgtataataagaagaatctgccttatgcttaccagtggatcaagggaataagtacaccccccatcgcagctctacagcatcacaaggaaaacagaaagttctacccacgacactggtttgtcaccgatctcaagtcagcttaccactccatggatctgatcgaggcctccatctacgtggagatcttttgccagattaacggcatcaaccctgtgattgattggacaatatctatgatactctactgcactgacccaaacatgacccttgcagaaggactgcccgttagtccgtggctcttcaacatctacgcacactacaagctggacatttatctcgccctactggcgcataaatacaatgcccgttacagccgcttaggcgacgatctgattttttccagcccagaaccttttggtaagaggaagagaaaggccattctgggctttgtaaggaaccaagggttcactatttccgaaagaaagaccaaggtgatcgatttgacaaaaaatcatggcgcgtcgattaacggtatcgggatccggaacacagttagcaaaggggagcttttcctgcctcgagattatagggctaaaataaaagggctgctccacgtcgcactttatgggctcgacgagaatggcaggctgaatgacccaagcaattttccagagatcaacggaatgatggccatcttcaagaagttagtgcccaaaaacgtggactcctggactaaggatgacgactggattgtggagaactatgaaattttccgcgagagttttcataataaagccggctga

SEQ ID NO: 14467 - RNA, 966 nt, synthetic construct
  source 1..966: mol_type = other RNA
atgattccttcactgagaggcctgctgattcttgaccccgagccctcttcccagaaaggaggtggcaggaagcacaacaagaataaattgcattacatccccaacgactctctgcgggtgctgcatgcctatgccttaagaaagattgaggagtacatttttgagatgccaagtgcaaccgggtggataaagggacgcggcagcatcaccaaggaccatattctaagtcacacaaacggacaaggtttttttcacgaatattggtacatcactgacattaaggatgctttcaggagcgtgaatcttcagaagatgtcatgggtactgtgcaacctctttccttactatgacttcaccaactggccagatatgaaggaatacctcaagaaatacttcttcgcaccgggaggctccggattagctgagggctatagcacatctcctaagctgttcaatatatacgccgagaaaatgattgaccagcactttagagaactgtgtactcaatataacatcagctacactagatttggagatgacctcatattcacttctgacaccattatcgggaaaaaaaagaagaaggcattgctttcgatcctgcgagtggctgaattcacaccaaatgataataagacgcactcattcaatctcaataaactcaaggaaggtaaaatcatcaacggggttgggatccgcaatacttcaacccaggcggagatcttcttgcctcgcagcaagcggaagaaactggagatgctactttatttattctggtatgatgaggccaaactcaatcccaggaaaattgagggtctgatgggctggtttaaccaggtcacggatagttccaagaaagggaaaaggaccctgaacacatccgaagaaaaaatcctcaagtactacaaccgggcctcctttggcttgaaagaactgatacgagaaatgcgtgaggagacaacctga

SEQ ID NO: 14468 - RNA, 1191 nt, synthetic construct
  source 1..1191: mol_type = other RNA
atggcacggcgatgtgtcccggtcgttgcctccacacctatgtgcctggactcttgctccctgctgacaagcggtcgcagcacccaatactcctacagcagcggcagtcctcggctgatcacgggtttttatgatcttggagctaacatgcccctgcacaatactggacaattggaattggagttggaagccctcatggaagagcccttattccacagcttcattcacaaagacgttaatcggcttagtggaaacgtaaagtttcggagggtgagcgcccccaacaaagcaatgaggaagatccacctccagattcgcgcggcactcagtcgtctggatgtggaaatgccttatgtgaccgccggcctgcgaaaatccaaggtggttaatcacgtcaaggctcatagagggaatcaatatctgtgttgctacgacttaaaagcggcttatgaccatgtccggcctgaggccatggctgatatcctgcggcagcatggccttcctgaatccgacattgagttggtggcccgatattgtttcggcaacgagtcaggagggctggtaaccggaggactcgtatcagtgcagctatttaacctgtacgccaacgaagtgattgatcagcccctggctacacttttcgccgagagggggggcattacttacacacgctacattgatgacctgatcatcagttctggtgctcccattggaagacgtttcagacgatcaatactgcagataatccgcgccgccggctttgagataaagcctgctaagactcagcttatcgacctcgcggcggaacactctcagatggccgtgctgaacgggatcgggttggacctgaatggcgagctacacgttcgcccccattacagagagctcctctaccgcctcatcaagcgggctcaggcaggggagatagatccatcagtcgtgcacggatgcatgggcgcattctatgtgatcaagccaagaggccaacagatgacccctggcgagcgcaagctagaccgtgcctacagatggtacgttaatcagcagaggagggcagatccaggtaggccagaaagaaggagacgtaaacaacagcagtatagggcaagacgccgattaaaaccgtcgtacaaaaggcatgggaggcggtctggtcccgtgggtacctatcggccaagaccaacgttttga

SEQ ID NO: 14469 - RNA, 984 nt, synthetic construct
  source 1..984: mol_type = other RNA
atgaagaccgaaaacaatcctgccttcaccaaacgggtctatcaggacttcaatcccgtgtctagacacagaaagacgaggattatttacgagccaaatcgattaatgaggcaggtccacgccaagtttttgaaggagttcggaggcttcctgccacgcggtctgcctattactgcttgtatcccgggggcgtcaccaaagatgaacctagaaccacataggcgaaacaggtatttctacctgactgatatacatagcgcgtattctggcgtgaatatctatagactggcctcacttttgtgcagcctgaggcctgaccttaaactcttcaggggtgacaagctgccccacgaacccctcgatctcttcagagctgaggacgggatggtgagctttctgaggtcctattttttcgccgaggagggaggattagcaacaggaggccccgcagcaccttttctgtttaacatttactgcgccaattttttggatgtacccctcatggaattgtgccgcaaatgggagcttacctacacgaggtacctggacgatctcacttttagcgccgcagacggcaaccccattggtgacaagaaaagagaagcaatccgtgccgttgtgatctccgctggcttcgaaatatctcatcgcaagagtcaggtgctggaccttaaaaaagggacaatttctatcaccgggatcggcctcgagtatggaggacgcctgtttatgcctcgggcttataccaacacactgagaggggctttataccgtgttgtccggcgccgatcggacgatgatgagcgggtgagagtacggggcatgtactccgctttccttagtctcatagatctgcggagtgccaattgtactgaaaagaagatcatcgagctagcggggcgtgcctttccacctaaaccgaaaaagccaggctacacacccaaaacctcctcacgacgcaagcgccggagacaactggagtga

SEQ ID NO: 14470 - RNA, 990 nt, synthetic construct
  source 1..990: mol_type = other RNA
atgtccaaggagacacgatctatcaccgcgccaccagctaccgagcggagattcataaacggtcgtaacggcggcaagagacgagaagttttcgtgcccaacgccgctatgcgggaagtccacgcgcaggtgattcgggagactcgtcttcagctgggcatcccctctcacaactttgggggcgttagaggcgggtctgctgttcgctgcgccatgcaacattggggtaatcactacgtctacaagctcgacttgtataacgcctacccttccgtaagacccgagtggctgtaccccgtactggcagaggtgaaatcagaactctgggtcgatcaggttggaatggaagactttgtgagacggtatttggctactccgcggggtcgcgggcttatgaccggaacacctgccgcaactgacctgttcaaccaggtggcggcacgcaaactggacgaggccctgattgagttagctgaaaggtggagccttacatataccaggtatatcgatgacctggtctttagcagttgggagcctattggaaggcggaaacgggaagctatcagagccgtcataaagaggagcggcttcaggttgaattacaagaagacaggctactacgacgtggcccgacgccctgtgatgatcactggactaagactgggcgcaggtccatcagccggggaagctagtgatgatatcaatcgagccttcgccatttatttaccacgcaagtggcttcagggactagagggatcgatgtattgtctggtcaatgggaaaagcaatagagtgggtaaggcaatcgagcctggggtggtagaagggaggatgggggctctgagggaacatctcgcactcggcggatttccctttgatcgccaggcagccttggtttggcgtaaatacacctatgtgaagccaattacgaggcccaaagtgccgctgtcccctatggaggagtggctccaacggctcttccgcggctga

SEQ ID NO: 14471 - RNA, 972 nt, synthetic construct
  source 1..972: mol_type = other RNA
atgtcaaacaagccgatcttggcggcccctgttgaaggggccgcctttagacacttctttttaaaagacgtcaaccccctcgggggtcgtacaaaaagacgccatatcagcgcgccaaacgctcagatgcgtgaagtgcactcggcactcatttcatacctgaggagcctgccagcagaccttagcgctgccactggcgcacgaaaggggcatagcagtattaccaacattttcccccatcggaataatagatacttcttgctcctggacattaaggatgcctatggcaccgtagacgaggagaagctggtgcaagtgctcctggagttggatccaacactccctagggacctctttggttctgaagtggttacccagtttctgcagcgttactgtcttaacaataagggcggcctattaacaggcgcacccgcttctccggacttatataatctttacgtcgccgtccttctggattctaaactgatcgaactgtgcaagcaatacggactgacatataccaggtacctcgatgatataactctgtcctccatgacacgcatagggaaaaagaagcggcaggccatctacggactgatgcgcgaagctggtctggtgatccacgagtcaaaaacccagatccttgatctgaatcggggccccgtgaaaatcgctggtttcactttgaatcaaaacaggtccataattcttcctcggtcctatctaggaaagattcgaggggccatccacaacgccatagagaaagggctgtgcgataaggctacgcaagtgcagatcagtggcatgatgagccagctcttggctagtctacaggacccctccgtacggagaaagggaggacgccgatatcgcagaaggcctaatagcactgagaaaagggttatggaccggtattgtgcgtacagacagctgtgcgcacagacgatttctccaaaactggccacctcatga

SEQ ID NO: 14472 - RNA, 951 nt, synthetic construct
  source 1..951: mol_type = other RNA
atgagtttcgagaacctggtgctgggatttgagctaaatccagctctattgggggggacccctgcattccggatcttcgccattagggataagaatccgttaagcaaaagggagaagggtcggcgtcctctggaggcacctaataatgccatgcggataatccacggcagactcatcaaatatctgagatccttgaaggtagagatgccttatgcgacagcatgtcgcccaggagactcaccgctgaaaaacgtggaacgtcacagacagagccggttcttttgtctgcttgacctgcgacgtgcttatcagtctgtgcaggttggcaagctggcaagtgtcctccaccaagccgacccccggttaaagggccagttctgggaggtgcgggccttcctccagaggtactgcatgtcccagacaggcggtgtacccgctggagctccagctagccccgatctgttcaacctttactgcgccgtccttttggacgaaaagatcgggaacctgtgtaggcaacatggcctgatctatacaaggtacgtcgacgatcttactatttcgggcaacattacggtgtcaagacgagtccgcgcccaagtgagagccatcattgcgtctgccgggtttaaagtgaatcatctgaagtctcagacccacgatctccagaaaagcaccctggtgattaatggcatcggtttagaactcggcggaagagtatttgtgcccccattttaccttaggcatgtgcgaggtttgctacacgaaggactgaagggggatctctccttggccccaaagattcagggcgcaatgtcagtggttctcgggatagtcaaccagcgaaaacccactgcctccgaacaacgcgttctcaggcagtgcaaacgctttagacgcctgataggacagaccaaacgggagcaacgcaaggcgcctgctcccgtttga

SEQ ID NO: 14473 - RNA, 1023 nt, synthetic construct
  source 1..1023: mol_type = other RNA
atgcaactttccctgcacgataagatttttggagtcggttttgacgaaacactgcgaacctttcccgagcctccagccatgcgcctgtatgtccggttctgtgggcacaccatgtcaggccacggcaagatgaggaagctggaggtaccaaacaaagcgatgagggaagtgcacatccgtctgctccggttcctgcggacattgcccagcgagtcctcttacgcaaccggttgtaaacctggcgacagtcccgccaagaatgtgaagagacacgcagggcagtgcttcttttacttagtggacctccggggtgccttccatagtgtggacatacccgtcctggccggcatcctacgaaaggcagctaagttgccgtctcgacaggagtcccaaatcctggccctgctcgagcggtactgtgcctcacattttggcgttgggggtttggctgaaggagtgccagcttccagcgacctcttcgatctgtattgcgccgtgaggatagataaacagctcggcccttattgcaagtggtggggaattcggtatacgcgctacgctgacgatctggttttctcgagcgagcgaccattaagtagaaagatcagacagtacattcgcagaattctggaagaggccggattcgctatctctcaccataaatgtgagctccgcgatctgaagaaaggacccattaagatcaacgggataggccttcagcctgatgggcggatgtttgtccccaggcctttcactagacggacccagcaccttctgcacctggtactcgagaaaggcaggtgggaactattgcttcaggttcaagggcgaatggcgctgtttcgccaacttacagacgtcagaaatccaaacaggactgaaaaacatctcttggagcagtatgcagcattacagcgcattctaagaaaagaaaagatgcgcgctcgtgagcagaaaaagagggtgaggcagtctggaagaccggaatacctgcatgtgtcacgtagccctatcgcctgctga

SEQ ID NO: 14474 - RNA, 939 nt, synthetic construct
  source 1..939: mol_type = other RNA
atgtttgacaatctgagcgatcttctcggggatgaaccgagtttcagggttcacagactgcgtgacgaaaataaggtgagtggcgtcacaaaatggcggaccatccatgcccctaacgatccaatgcgcaaactgcattctcgaatgattgtcgacctgcggctcttgcaaacaaaggtacacggccgctctccctacgctaccgctgtccttcctggtagctcacctcgacgcaatgtggagagacaccgcggcaagaggtatctatacttgctggatttgcactccgcttatctgtacgtgaagggaggagagctcgccttcatcctatgcactctcgcggcccaaagggacggatatttggttgcagacccctcggagctctcaagcacccacgattttctgaagcgatactgtctcggcaccactgggggcttactgacaggggcacctgcaagtccagatctattcaacatttacgccggggagcttatcgaccagagactggcacccagactgaaacggtggggattaacctattccagatacattgatgatctcactttttctagcaacgagccgatcggggaacgtaagaggcgcgccattcgcgacgtgatagctgccgcgggcttcgacatatcctaccggaaggcgaaagtgtacgatctggctaaaggtccagtgcagatcaatggcatcggtctggaccttacgggtaggacatatgtgccccgtaagtatcttgggaaagtaaacggaatattgcacctggccaggtacggcatgattaaacccgcaaaggttgctggctacatgggagtctattggaccgccactccaagatcacaccaggggagaaatagggccgaatgccatacgctcgagttatttcatgactatcagctgcatcggaacgactggctgatccggtcctga

SEQ ID NO: 14475 - RNA, 990 nt, synthetic construct
  source 1..990: mol_type = other RNA
atgattttcgacggcattgatttaccaaggtctggcaccaaagccgaatttaaggcctggcagaagagggacgtgaaccctctggggagaaccagccgcatgcggacactccacactccaaatgaagccatgaagtatctccacgaccgcctggtgatcaacttaagaagaattaaggcagtggatctgacttcagcagctagcaagccgggcggttctgcattgcggaatgtgctcaggcacaggcataacaggtacttctatcttacagacatctcaagcgccttcgacagtgtagattctcaccggctggctgccgttctagctggcctcgatactcaggtgcgcgaaagtgaggtctacgcctttttgcggcagttttgcatgacggagcagggagggcttatcactggcagccccagttcacctgacttgtttaatatttattgcgccgtcctgatggacggccagatgcgagagtactgtctgagacatgaggtgacctactcccggtatttggatgacctgaccttcagctccaaacaggttatcggtgcgcggaagagagagaagatccgtgagttaatctctctgtccggtctgcgcatagggcatcataaatccagggtgttggacctcaaaaagcaccggatcgagatcaacggaatcggacttgaatacggagggcgcgtatatctgccaaggtggtatctctacaagattcgaggtctgatgcacgtggctgaaagatcagaagatccaaaactgctccagagagtccacggaatgataggactacttcaggcatcgacggatgcgagtcgaccccgcaataggctggagacaaaggttttcagcgagtacgcccaactgcgtcatcagacacgaaaaaaacccttcattcctccccctcaagggcgtgctccgattggcatacaaaccggggacccttggggctcccttgacgatgatgacgatgtccccttttga

SEQ ID NO: 14476 - RNA, 1035 nt, synthetic construct
  source 1..1035: mol_type = other RNA
atgattttagaaagcttcactacaggactcccagggaaacccgcgtggcaaccgtttaggtatcgcgatgtgaaccctttgggcgggactacgaaggttaggctactgggagcccccaaccccgctatgcgccttctccaccataggctcgtcagatttctgcgcggcctgaatgtgccgatgccacacgcagtaggtgcaagacctgctggctccccagtagtcaatgttagacgacacctctacatagataatagggggcggccagctagatacaggccgaatcggtatttcctgctgtacgaccttcgccatgcctactgtaacgtcgatcctggtctgttggcgggcattatatgtcaacattgtcctgaactgaccgttcaggacggcgccgtactggacttcctcctcggatactgcttcggaccaaatcctaacaagccttaccagcttgagcttcccattggccagcggcgtcgaggagggcttgttcaaggcggccctgccagtcccgatctgtttaacctgtacgtggccatcactctcgatcagcccctaggtgagctgtgccagcgctatgggctcacatattcccgctatcttgacgacctgaccttttcttctcgcgaaagatcaatcggaacaaaaaaaagacaggtgattcggcggaagatccgtgatgcaggttttaccgtcagcgaccggaaggctaagaatttggacatccggaaggggcccctgactatcaatggggtctgcttgaacaggcagggcacgatcttctgccctcgttggtatctcagacgcatcaggaccctggtgcacgccgctagaaaaggcgctgccgtggacctggccgcattacacggaatgatgggggtgttcaccgccaccttgccaaggcgatgggagttagtggacataaacggaaggcgttcggaacggagagtgccagtgggtagactgcggattgagcagaaaacactggatgagtaccgacagctacaggcacgacagcgcaggcaaccctga

SEQ ID NO: 14477 - RNA, 1038 nt, synthetic construct
  source 1..1038: mol_type = other RNA
atgatcgataagctgacctttggaattgatatcgaaaatgccacgttcaaaatcgtcgtcattaatgataagaacaacctgtctggaactaaaaaacgccgtgtcatccacatgccttctcctgaaatgcggatcattcacaaacgcttaatacggtggatccggggacagaagcgacttgtgcccatctccgcttctgggtctagaccaggtgattccgtattcaaatcggttttcattcacaagaagacaaggaaacattcatatgtgagtaacggatacactcacattgacactatcggctggttcccccggcactttttctgcttggatattaaagacgcctttccatccgtgtcagttagcaaaatgacagaggccctgctgtttgctggcttggaccccaatgactattcatacaacaaggtaattagcatcctggagaggtactgttttactaaagaggacgggctgatagtgggggcaaatgctagtccggacctctttaatatatacgcagagtattttctcgaccgcaatctcagaaggtactgccatgagcatagcctagtctatacaagatacctggacgacctaattttcagttccaataagacgattggcaaacgcaaaaggaagagcatctataagttcattgatgaaagcggccttaaggtgaatgagaagaagacaaagatctatgatcttagaaaggggtgcgccgttataaacggcatcggcgtcaacgaaaagggacgaatgttcatccctcgtcaatacctcgacaccctgagaggttacatgaacttataccttaaggggaagatcgagttgaaatttaattggctcaggggtaaaatgaatcctctcttccagtgtcaggaacagtccgatctgctgccaaaccggaccgagggcaaggtgtttgacctcttcgaagaagtgaaggtgcgattaaaattccccataaacacctcactggatcatgacgatctggatgacctggcgtatgagaacaccgacgatttgaacttttga

SEQ ID NO: 14478 - RNA, 984 nt, synthetic construct
  source 1..984: mol_type = other RNA
atggatcgcatcctgtttaccgagagaatgctctgtaatataggcttgcagatcttgcctcatataaaggacgaagacttttacagttttcgggagaagttccaggagaagcacctccatcacttcgtggtgaatgatatcaacagcctttctggccaagaaaagcagcgtgaggtcgtgaaattatctacagaattggatctgtttcagaaagctttactctcaaggctgaaaatgcactatggtgaggttctgagaagtgagatatcgaattcccacagatccgcacttaacactattctgtgtcacaaaaaggtggatctatatcgcggagaaaagaggatttacttttccaggttctactactctatggatattcaaaacgcgttcggctgtatgacaaccgaaaaggtactggaggttctcaagggagactttcaagacgagtctctggagaagatcttaaagctcacttgctttgacctgcatcgtggcatcattacaggtgctagtgcatcatcatacctgtatttcctatactggcagaagaaaattgactccaagatttatgagttgtgccgcgaggaaggtattatctgcacaagatatgtcgacgatttcctgttctccagtgagcacaaaatcaccaaaagcttcagcaagaaagtacttaaggtgatccgcaatgccaactttgaaatcaacttccagaagacgcagttttatgacctcgggcgggaaacctttaatgtcaatggcatagttttccgaaagaaggataaccggggggctattggaatacccaaaactaggagcaggaagctgttgggaatgcttaaccaatacgaaaaagggaacatcaaaatcgcccagctggcaggcgccatgtcactcctggagaaaattagccaggtgcataatggggccttcctttctcgaacccatcagaaaatcctgagccggtacagaaagctgaaacggtga

SEQ ID NO: 14479 - RNA, 945 nt, synthetic construct
  source 1..945: mol_type = other RNA
atgatttttgacagactctgtattacagagaagcccaatgctgccttcaaaccgttcataaacaaaaaggggcggaaattgaatcggcaaaactctgacatgcgtgaagtacatagagccttcctcgccttcctgaaaatccaggacatccacatgccttccgcatacgggactggtggaaaagcaaggaacctgtggcacaggtttctgcagcacagagataaggacacaggtaaatttcagaaggaatggtacatactggacttagctgatgcctatggccatgttaatatggaaaagctggtcggcgtgatcctactcacctgcgacaatgagcttcggaggcgatcagatgatttgctagcgtttctcatgcggcattgttccagcaccagagagaaggggctcattcaaggagctacgagcagctcctttctgttcaacctgtaccttgacgaactggtggacattcctctcgagagattctgcaaagctcatggagtgacctacactaggtattacgatgacttcgcctttagtggccagaaagggacactgttaagccatcgccgtggcaagcttattaggaaaggcatacgcaaaatactgatcaaggcaggattcgagattaatcacctaaagtcgaaatgctttgatctcactaagaagccaaccaaggtgaacggcgttcttctggattattacggacggatctcactgcctaggccagtcatcaagaagatgtctgggttgctccaccgtttcgtgcacggcaagcacctgagttcttttgttgtggacgggaacttaggtagagtacaggatatccatgatatcttggagcccacctgttgcatcgaacagcgactgcttattctgtatttggagtactatcaccaccgctttcgcggtcgcgtccgaacacggcaggacgatcccttctga

SEQ ID NO: 14480 - RNA, 1098 nt, synthetic construct
  source 1..1098: mol_type = other RNA
atgcggcggatagtgatgatccagcagaaccacgctgtgctgcgaggaagccgcactgacgccgaggatgatccactacgttttgtgactatggtcggtgggtgtccccgcattgactttcattggaagcaggataccaacggaaaaaggcgccttattgggaatcctaacaaacccctccgtcggctgcaccgactctttggccaatatctagaggaagccattagcaagatgggcaaggagaattacgagctcattaaatttccctctagtaccgctttcgtcaggggtaccaatccattgaaaaatgcccagaaacaccaaaagggcaggttcttctatataacggattttgcaaatgcataccccagtgttgatttggtaagattagcggttttaatcgtgtatatcaagcgccataacgtgtacggactggagatgagcctgcggatgcttgggcagaatagagtcctcgtcagagaactgcaagaggatccgctcttcctgagtattttggcgttcctggaaagctactgctcaggccagtatggtcgaggccttgcagttgggggaccaaggtccccctacctgtttaacctgtattgtgaagtgtacgccgacgccggcttaaggaaggtgtgcgagcgctacggaattacattcacacgatacgccgacgataacgttttttctcgcgacaagcctatcacttccgacatccggcgggaactgaggaggaggatcgagtcggctgggtttcaggttaatcatcgaaaatccaaagtgctttgccgggacatgggcaccgtattcgtgacaaaggtcggtctgagagatcagaacctcgtggcaccaagatcagagtcagctaaggcggctatagtattccctaagaaaaagcgccggagactgcatgggattatcggctcttacttgcacatgcagatggactggcctgagaaagtgtccggacggatcgccgaatttctccactactatagacacgtcgagcgcaggacagcagccgaccataaaaccttcgccctgtgtaaggaattcgaacgtgagtgggctaagtatcgtaagagaagaaaatga

SEQ ID NO: 14481 - RNA, 1059 nt, synthetic construct
  source 1..1059: mol_type = other RNA
atgcgtcacgttcgcagtgccgccccacaagaacctcccgttgagaactgggatcctttgcattttgcgaccatggtgggcggacaccctcaaatccatttccactggaaggaagagggcggtaagcgcaggttgatcggcaaccctaataaacctatgcgcaagctacacgaagtctttggacagtatctccgtaaaggtatttacgcgatggggaacgataattatactctccgcagactcccgagcagcgctgccttcgttaagggctccaatcccctcaagaatgcccagaaacatattgaaggcaggtttttctacatcaccgacgtttccaatgcttatccatctattgatctggaacggttggcaatccttattgtctacatcaagaagtactacgagtacggcccgaacttttcattaagtgcattcggacaaaatgccagcttccgggaccaggtacggagagattggctgttcccacccgtgcacgctttcctggaatctttctgtagtggcatgcatgggcagggtttagcagtaggcggcccactctctccctttctgttcaacctttactgcgaagtctttatggatgcccaggtgcgcaaactgtgcgagcggtatgacatcacttacacccgatatgcggacgattgcgtcttctcacgccacaagccaataatcggggacattagacggaacgtgagggagtgtatcgccagggctgggtttgaggtgaatcaccgtaaatcaaaggtgctatccagagagatgggggcagtgttcgtcaccaaaattggtcttcgaaacagaacaggaaaagaagacgggtccgagacagccaaaattgtgttcagccagaagaagcggagaaggctgcatggaataataggaagctatctgacaatgcagatggactggcccgagaaggtgtctgggctgatcgctgagtttatccactattacaagaacgtggatgagtcgacagcaacggacaggaaaacttttgctctgtgtaagctgtttgaagccgagtgggccaaacatcgatga

SEQ ID NO: 14482 - RNA, 1041 nt, synthetic construct
  source 1..1041: mol_type = other RNA
atgagggatatgatcatgaggcctgaactagtcggacaggcctgtggagggtaccctctcataaacttcgaagtgagagacgtgaggggaaagtcccgcctgatcgggattccaaatcgtcccatgcggtcattgcatcggcaactgggcaaatttctgcgaggaatcattatgcacaccgacggcagcggctacggcttacggaagctgccgtccgcttacggttgtgtcgaagggtctaatcccctgcggaacgcatctcaacacaaggaaaatcagtatttctacatcaccgacatatctaacgcatatgggacagtgagtctcgagaggcttgccctcctgctaacatacctgattcagtacgaggcctacgaggagtctggtttttccttggcttggtttgggcaagatgaacgagtatgggtactgcgccaggacgaagcctatcagccggtcttgggtctgctggttgcgcactttggcgggcttcatggccagggcttggcaataggcggtcccctgtcgccatatctcatgaacctttattgcgaggtttacatcgatgcccccctcaggaagttctgcgaacctagagagatcacttataccaggtatgtggatgacctgaccttcagcgcaaaacatttcatcggcgaggaaaccagacgaagaatccgagccgttattagtcgggggggtttcacgctcaacaggcagaagagccgtgcccaaatgttgagtatgggccaggtgagcatcacacagattggattagctcgcgatactccagacggctcaacacgccttgtctttagccagaaaaagcggagaaaacttcacggtattattcactcctatctgactcgcggaatggattggcctgagaaggtgagaggatacgcggccgagttcctgtattactacaaaaatgtggctgtgcgcacagctaccgacgaaaagacgttcgagctctgcaaacggtttgagagagagtggaagttatacggagggccaaaacatcgtactaggtcaaagtga

SEQ ID NO: 14483 - RNA, 939 nt, synthetic construct
  source 1..939: mol_type = other RNA
atgattttcctaaaaaaggcccacgagaaaacatgtgatgaacttccactgtttttccccagactcattcgccgccagaaccagaaaacgggcgcatggaaaattcggagggtgtacgagcctaacgacgccatgcgtgcaatccacgaggaactagacgagtacctgagatcacagccacggttccctaagcatgctccaccgcgacccgcggaaaatgttgcacctcatagaggtaatcggtttttttacctgacggacattgagaacgctttcggcagtgtcaaggtggatggtctggtgaaggccttctgccttatgaattctttttggatacctaggaagcgaggcctcaaaaacttcctcgagaactactgtatcgctcctgaaggaggtctgtatcaaggagcccccagcagcccggccctttttgagctgtacgcctgggctttcctggagaggcccatacatacctggtataatctcaaaaagtggtgcgggtggaacgatgtcacatatactaggtatgttgatgacttgactttttcctccaaaaagcggatcggccgcgggactcgacgccaaatcagacgcttgttgcacaacgctgaattcaccatcaacaatggaaagaatttcgtgatcgatcttgccaatcccaagactccaagaatcaccattaccggtatagggttagagtacggagggcggatgttcgtctcacgagaaaggctgagggagctggagaaaatgttgattgcggggatcgaaggagaagacgtgaaccctcacaagattgagggctttatgtccgtattttggtcgccctatggcggcaaaagaaggagtgccgtgctcacacgcacccagagacgtatcctgtctttaagccgggcatggcgtaagctgcagaagaagaatcacacaatgaccccatga

SEQ ID NO: 14484 - RNA, 1221 nt, synthetic construct
  source 1..1221: mol_type = other RNA
atgcaccttcagttgctggtggaacaggcaagcgcaaccgagacaccgcctgcgttttctgtcgtgaggaagagggtgggtaaaaaagtacgcgccatagcagttcccaacgctagtatgagagtgttgcataggctcctgatcaatgaactggaggcaccggggtacctgttagaatctgcaacagccaaaaagggttccagcatcattcaaaatgttcggcctcacctgcatgcccggtcagtctacctcctcgatttcgctcacgcctatcgttctgtcccagtgcaaaagctggcagcctccctgcactttcggttcccaaccttcggaacggagagggaaattgctcacttcctcaaacaatattgcttcgtcccccgacacgggttagcacagggagctcccgcttcgcctctgctgtttgagttgtatgccgagtgggaggtcgatacaagtatccgccaatttctggaaagagtagaggacagcataggcggcagaatcaactacacccgctatgtggatgatctcaccttctcagccctggagccaattccagcgtgggttcgacgcggcattaggagcatctgtatgtccgctggcttctctattcagcatagaaaaagtgtggtgggcagcctgggaactaaagtcgttgaagtgactggagtgcacctacttgcccccggccgtgctatgttgtcacgggacttttgcaacactctagagcgcaccttagatacttacctgtctcagctgttctccgagcccgacctgcgcctcgaaggaatgattgtctactacgttgggatgatgcgagctctcggtgacgtgcgggcgagcaatagaagaaccgtgagaatcgataagaaaatcaaggcctacaggcttcggacaggcttcgctccatcacataagaggaagacattttctaatagaacccttgacgctatccgggcccagctacccgtgtcacagattgtctcccgcagcgttgcccttaagcgtgcagggaaggagtataaaggcctgagtcctttcaaagtagaacgaactcctagcttttttgtaaacgatcagaagggattttaccattgcttcgccagtggctcccacggggacatattcacgttcgtgatgtttagggagcagtgtggttttgtggaggccgtcgaaatgttggccaaggaagcgggggtgtccctcgactatgactga

SEQ ID NO: 14485 - RNA, 990 nt, synthetic construct
  source 1..990: mol_type = other RNA
atgcagccagctctctcttttgatattatgcccaagaggttccatcacaacccaaaccagcctgaactgttcacactgactcgagatggttccacaaaagtacgggacatctacgtgcctaccgacgaagtgcgtatgaaacacgaagccatgctccgcagattgcacgccttggagatcccgtttccccatgcccacggcggattgcctggctttggcgtgatcgataacgtccgcccgcaccaacaatcaaattatttctacaagctggacatcaagaatgccttcccaagcgtagaccacgagtggctccagcggaccgtccatgacatgctcgtcgagaggagggttcgaaaaagcgatatccgcgacatcgatcacttcgtggaagccgacgcactggttgacggttgcccaggcctaccactggggtatccagcttccccctttttgttcaacatatattgtagacccacagacttagcaattggcgcaggcctcgcgcttaggaaggactttggttaccaagtggtccgctattcccgctggttagatgatctcacattttcaagtctgcagccgattgatgcagggcatagacggattctacgtgagtgggttcatatgacccctgggtttgagattaaccacagaaagtcgcaaagacactctctcggacaggggcccgtgaccattaccggcatatcactgtaccctgatagaaggatggccccctctcccgaacttctggaaaaggtgcgagtgcagttcggccagatggccgagctgatcgctgcaggaattgagctgacgccccaggagatcggggagttcaatggataccatagtgtcctgcatatggccggggatcctcttaaaagccggagcgctactgtgaggctgttagctaaatggtacaatcggctggctcttcagctgccagacatggagagtgcggcccctggagaagatggaggttccactgactga

SEQ ID NO: 14486 - RNA, 927 nt, synthetic construct
  source 1..927: mol_type = other RNA
atgaagaggcgcacagtgttcaagcctgccactccagaagaccttcgaatacattggcggatgttggccaatctccagtcgattcagtgggaattcccccacagcgttggcagcttgcctggctcccatctgatcgataatgtgactcctcacatctccgccgagtccgagcaattctacctcttagacctgaaatcagcattcccaagcgtagacaccgatttcgccctgagagctgtgtacgatggaattcgcaccaggcgcggaagagatgaagcagccgaggcagctaggtttatggtggagacaagctatatggggcgcacacaggacgaaaaacccgacaagatgatgtatgggctcctgcagggcctaccctgttcaccactcttttttgacattatcagtcaagccctagacatgaggctgagacggcacctgcagcgcgtgtttggggatgatgtcgtgtacacccgatacatcgacgatcttacattcagtagtaggcgggcggctttcacccggagaaggaggaaagacatcgttgctcagatcgagacgttacctggctatattgtgaaccatgataagactagatgccaatccctcggaaggggcaccctgactgtcactggtctggacatgagacggaacagaaaatggcccaccgatcgacgtgtactggtggccccgtctggctcacagttagcgtccgtcgaacaggagatcaacgagatgacgagaaagttgcgcgaagacttgccaataacactttctgagaaggcacacttttatgggatgggaagcattctgcacatggctggtgacccctctaaatcaccgatgagcagtgttcgaaccctgaagcgtcggttccgggaggtcgataaagaactcaagaagcttccttctggacgtctgttttga

SEQ ID NO: 14487 - RNA, 1284 nt, synthetic construct
  source 1..1284: mol_type = other RNA
atgatcgcgctgaagagtctggttcccctacctctattcggcggggctcccacttttaacccccagaatatcttcgacggaaagaagtggcggacggtgcaagccccaaataacgtgatgcgaaaactccataaggaactcattgaagtgctcctcgaactccctatcgatttcacttctgccactgggagtctgcctggtaagagcaatatcttgaacgctaatgtgcacgccggtaaccagttcttctacattttcgatatgaaggatgcttttcctagcgtcccaattgatcgccttgcagacaccctgcatgtctgctcccacggccacttaggaaccagagctagaatccggtcttttctcgaggactactgtgctggaccccgaggattggccgttggcgcacctgcttctccccttctgttcaacatctattgcgccgtcggggtggatccggggattaggaagctgctgagatcagataccatctatacccgatacgtggatgacctggtaatcagcagtagccgcccgatacccaggattctgcgcaagagaattaggaaagtcgttaccgacgctggctttgctatcaaagaccccaagtccaaagtgctcgacaaagaaaagggccccgtgactatcacaggggtggttatcgataaaaaaggacgaattgcacccacaaaagaatgtctggcagaggtcgaggaccttctgtggataccaccacaggaactgaccccagaacagcagaaacgcatagcggggttcgccagctacttgcaatcctttcgggagtttgggcggcaaaaattggccgagggcaatggcacagtatcaacagccccattgtccccagtgctggataccttagccaaaaggtgcagaattcgcctgcgtgagaacaagaagcctagaactcagaagcagcagatgcacctggtgtttcctgaagtgtttattgacgaaatacgggcaaccgcctcgcttagagacgtgatcgagccgtatctaaggccaggtaagaggggactccgcttgaaaaaggtcggcggtgagtgggcaggcttatgccctttccataacgagaaaacaccttctttcacaatcgccgaggagaagggcttctttcattgttttgggtgtggaaatcacggttcagttatagacttcattatgcgtgtagagaggctcgagtttccagacgcagtccggttcctggcgaagaaatatgatcttcccctgccggaacgtaagcttgagcggacgaagaattga

SEQ ID NO: 14488 - RNA, 1260 nt, synthetic construct
  source 1..1260: mol_type = other RNA
atggccgcaccccggctgtcatgttctctgaaaaagtacggatttaattccaaggaagtggttgttaaggtcaacgggaaaaaattgttggcggacctcatgaactggccagagaagaaaattgaacaggctattacaagacgtagtcggtattacctcgttaaaaaaatcgacaaagacgggtccatacgaaagacgtacgctcccgatcgtgagctgaagaagctgcagaagaggttcctaaaatactttctgtatcggatccctgtgggctggaagaacttgataaccgggttcaggcctggttgctcgtacgtgtataacgcaaagtgtcacgctttagccgatgccaagatcgtgctgcgcctggactttgccaatgcgtttcccactgtcgagacaagctacttgaaaacgattctggccaagattctgagccaggaagtggagtatcatcgaaagggagactatcctttccatcctctattccctgtgaaaagagtgaaatggttcaggagagcgattaaaaattactaccagcttgacctcttctgtgatccagacaagatcatatgcgagtttctcgatcttgtgttatccttcgtcacctatcagggaagacttccacagggggctccaaccagcccgtacctttttaatatcgtactttggtacagtggcctcatccaaaagatcactgcatttttaggcgagaaacgcatatctgtcagtgttggcaacgttttttctggagaggtgatcttcacagcatatgctgacgacttgaccatatcttcctcccgtagcatcaccaaacatgaggtgaacaatctgattgatctgatcgaacaagaatcaccattcaggatcaatcgcgagaaaatttgctactttcaagccgatagaatcgcccctctggtgacaggactccgcctcgtgaagttagtcaaggaagggcgggagctcgatgtcctgatgagcaaagcaaacctcaacagcagggagaagaagaatctgaagcgcaagattctgaatcgcgaaggccggtggattgtaaactctgtatccctaccgaaaaaaggtatccgaaaaattagaggtctgattcacaaggctacttacgcccccccactcattcagcggatgctggaacagaagatcaagggtcacctgagttgccttaaggccatctatggcgataagttgcccaaccaaatatcaaagccctatcagaaattccagcagtcactgaggggctga

SEQ ID NO: 14489 - RNA, 1170 nt, synthetic construct
  source 1..1170: mol_type = other RNA
atgatctcaaaagaccttctgactagcgtgcttgactggcccgaggaaaagattaacaaagcggtgctatttaaggacagctatcgattgatcaaccggaagaagaaggatggcagtctgcgaaaaatttatgcacctcatccagatttgaaaaggtttcaacgccgtttcctgaagtattttctgtatcggattcctctcatttcttcccttcctatcaatgggttccgtcccaaattctcctatatcgataacaccaaagagcacgcccagaaaaacgtgcggtttgtgttacgactcgatttccgggatgcctttccatcagtgaagatcgagtacttaagaatcatccttaagaaggtcttattcctggaagtaaaggggtacatggagaaaaactataggcaaagacctctgttccccaataaaagagtccagtggttcagaaaactgctgcgggacttaccacagctcaacctgttctctgtcgaccctttgaaaatccttgacgaatttgtggagttgattctaccccttattacataccaaggcaaattgccacagggcgcctctactagcccctgtctcctcaacattgttctgtgctactctggactcctggaaaagatttatcaatttctctgggacaacaggattcttttctccgagaatgacgtttcaatggtgaatagtacaatctacgctgatgacctcacgatctcctctagcgagcccatttcaaggagcagcataaatcagctgatcgatttgatcgagcaggagagtccatttaagattaataggcagaagatctcgtactttaacagagctcgcattgcaccgctcgtaactggactgaggatagtcagattggtgaaggaagagatagaactggaaaacttcctgtccaataaggacctgacctataagcagaagaagaatattctgcgtcgcaccctcaacaagaaaggcaaatggatcatcacctccgtcagcctgcctaagaaacagatccgccggatacgcggactgatataccgcgccatcagtgaaaaagctctggccccaatcatagatggtcacatggctaatctaaaagcaatatacgggcagaacctacccaatcagatcatggttccgtacaagaagtacctgattacagagggttga

SEQ ID NO: 14490 - RNA, 1212 nt, synthetic construct
  source 1..1212: mol_type = other RNA
atgagtcggatcaaaattgagggaggtgatacgctacttgccggggttttgggcatgccatcggccgacattagaaatgccatagtatgccgcgacaactataagattaagcacattgtgaagaagagcggcgggaggagaaggctgagcataccgtgcaaatccgttaagaagtttcagaagctattcctcaaaaagttcctgtattgtctgatcgaacggggcgtactggacaagaatatgaccggctttcttcccggggtaagtgtcaaggacaatgcgttagttcatctgaacgaaaacctccagtatgtggtgcgcctggactttaaaaatgctttcccctcagtgtcattccgggtggtcaaagaggtgctcctgcaccatgtgaagaacgaaatcggcacatacagggccgtggagattcaacgtctgttaggtaaaaagattaactaccccgagcctgtcctttttagcatgcgcaaagttaaatggttcagagagctggtcagttcactgtcagtcgataactctgcatcttactacctcgactacatcgtggatggattcatagagatggccgcatacctattgacttataaaggcaagctccctcaaggggccccaacctctccatttatgttgaatttgaccgtctcctatctcaaaatccttgataggattcgggagttcctcaaacagaacaacatcgactcccaagtgagcatctacgctgatgacatcgtgattagcgcaaaggaaagaataaacttcggtctgatcaggggactcattggggttgtcgaagcttccagggtgttcagaatcaatcgagcaaagattctccgctttgatattaatcagacagctcccctgataaccggcttccggcttatccgaatcagatctgttaacagaaaactgactgaaagctggcttgctcgcttgcctcggaaaatcaaggccacagtggaggaacgtttattttacaatccccagagtccttttataaatatcactttgccccagaagcagatcaaaaaaattaggggaatcatccatcgagccatctatcaaccaggactggcatccaaggtaaatggttacgtcgcgtacctgaaagacatttatggggagcacctgcctcgccagattgtggaaccgtataagaagtacctgctggtgaaccagaaggatccagaggtggtctga

SEQ ID NO: 14491 - RNA, 1044 nt, synthetic construct
  source 1..1044: mol_type = other RNA
atgaatacaattcaggagaaggccattatcgtcctctcatcactgctgtctaacaaattctctccagagaagatcaaagagatcctaacaagtggcattagctatagatacaaacctcgcaagaaaaaggacgggtccatacgcgattgctacgctccagccgaggatctgaaagccctgcagcagagcatcctctccgaaatcctgcacaatatacccgtgcacaagaacttatgtgggttcgtacccggggtcgcaatgaagaacggcgtggaagctcatctccgggagacgagagagaagaagattgtcggaagatggatcgtgaaagtggacattaagaactgctttccaagtgtaaagatcaaggtcttgaaaaacatgttcgaagatatcttcactggaacactgtatgcatatggggtggataatccagctgtgttttttgaattctgcgacatacttatcaagttgaccacacacaagggtggccttatccagggcgcaccgacctcaccttatctcaccaacttagttatttcctgggcgggaattgtagatgacctcgagcactactgtaatacacgccatggctacgatctgatctttagcatttacgccgacgacatcaccgttagccccaccatcaccaataaagcgagcgtcaaaaagataatccacgccattgagaaaagtaggattttcagggtgaaccctaagaagactactcagaatgacaatcgacataggagccatagaatcactggtatgtcaatccaccaggagtttgaccaattcggaccgtctgaagcctggactacgctgtcccggaaaaaacaaaagttttatcggggccgaatacagaaggtgattcaattcctacagcagggatgtgaaccttcgatcaaagagcacggcgtgtctattaaccaggctcgtgggtacattacctggacaaggcatgtttgtggtgaacggataccctcctgcctgaaaaaagtgatcgcagtgtttgaagagcttgttaataagcaagccttgtga

SEQ ID NO: 14492 - RNA, 1101 nt, synthetic construct
  source 1..1101: mol_type = other RNA
atgaaaaatagcaagtactacctgtcattgttcctgaagtttctcccaattcttgagaagatgaaaattacttctgctatggctgatggactcatttacacttattataccaaggagccgtactatcgcacctacgagattcttgaaaagaatgggaagatccgtaaaatcgacgaaccttgtgatgctctcaaattgatacagcaggagctgaatcgctacttttataggttccccactcacaaatccctgaaggcttatattgagaactgcgaaggcgcaaaagagacagccctgactcatcagttcactgtgtggggggccaaacccggcgatagacaatctaaaccacctagatggttgcttaaaatggacctgaaagactttttcccctcaataaagacaagaacagtggagaacgttctgttcctcaattttttaagggacaaggataatcagcaactgctgatccgtctttccgaaaagctgaacaagaagttcgggttgctgttcaagcaatttattgagcttctcatatggctgaccgcagggaacggatgcctcacacagggtgcccccacctccccatatctagcgaatctagtatggaccgaaagcggtgtgatcgagaagattcttgactacctccacagccggaagaaggaatttaatttagcaatctacgccgacgatatctcggtcagtttcctcgaacgaaagtacccacgcggagtgattaaaaacattgccaagatcatcaatgacagtgagtacttcaaaataaaccctaagaaaaccaagctgaaccggctgaaacatggcgcccacctggtggtgggtattagcataggcaagacatctcactttgaaccttcctttggcatcccacagaagtttattaacacactgcgaggcgaactacacaagaccattaccatcataaaaacggagacgcggcctatcgagcagatccatgaggttagcatccccatgatgagagggaaaatcggatgggtcaagagtgtctatggagatcggaggttgccgtcaaaaattaagaaactggtagaggaattcgaaatcttatctaggatcatctga

SEQ ID NO: 14493 - RNA, 1278 nt, synthetic construct
  source 1..1278: mol_type = other RNA
atggcgaggccaacggccctcgatgtgctgtcagcactgataggcctggataggcaaatcatcgaacttgcactgtcagagactgaaagctaccagaaaattgaaattccaaaacggaacaatggacggcgcatcatccacatcccaagcgaaattctagctctggtccaaaaatacttgctcgagtgcctgtattcctgggaggtccatgactacatgcacggatgtgtgataggaagaagtccagtgagcaacgcggccaaacatctgcgcctcaataagaaagagaatgtccgtccaggcactggcgaacagttcctgtatatgaccgtgcctaggcacgttctcaagctcgacctcagcaatgctttccacgcagtgactaaggacgccgtccaccagatgttaacatctgccttatctagcacatgggcggccaatctccacttgaagcaaggcgacacggatgtagagaaaaagagatgggatattatcaaccacgtaaggtctaacggctattttgtggagcccttggccagcctaattacccagctgaccaccaccgagggccttttaccgcagggagcggccacttcaccctatctcctgaacatggtcatatgcgcttcgggccttatggagcgcgtggcaaaagcctgtaagccgcggagaggacggttcacagtgtacgtggacgacattactattagtaccaaggagcctgaaattggtgaagggttcatcgccgctatgatcgaagccgttgagcgaggggggcggtttacggtgaatcccaaaaagaccagtcttacagattctagacaccgcgctcctgtaatcactggcgtgacattgggtaccaatgcagacgggactggtcgtcttagtatagaacaatcccatctgaacaccatcagacgcattctgtggtgtgctgccaacctgttagagcaggggatcaagcccgactttgatgaacacggattttccttggaccatgctctgggccatgccgcatgggtggataatgtttaccaggacaaagccccccatccactggtcgctaagcctctggcacgattcaggaaggcatttctctgccgagccctcggacctttggggacacaactgtccctgccctttggtgaggaacagcctaagcaggggctaagatcctcaaacaggcggcagctgctgcaggagctgttggatcagcttcttgaccgccccgttgaggagagaatcagggctatagatgagttcaacacacagcattga

SEQ ID NO: 14494 - RNA, 1032 nt, synthetic construct
  source 1..1032: mol_type = other RNA
atgcagaagtctcggaaggatgctgtagagattttggccaacttgatgagactgcaatccgatttcatattcgacgctctaaagaaccggaactaccaacaaatcctaatcccgaagcgtagcggggatgttcgcaaactccacgccccaggggaagaactgaagcttgtgcaggaggtcatcttacagttcctctacagatggaaggtggacgccagacagttcggattcgtgctgggcggctctcctatccggaatgccaaatatcatattaggaacgagttctatgtccctcactgggtcctgaaactcgaccttgaaaatgcattcccttcagttacatcgacagtgcttaggaaggagtacacacgagttttcaaccccgagacatttaaagaactgagcggcatcgatgaaaaacagtttaccgcctttattcagctcatgctggatctgactacatatcgcgagagattgccacaggggagtccctgcagcccctacctgctcaatctggttctcgtgtggacgggggtcaccaagggtgtgctggaatattgtgaaaaaaaaggcctcagagcttcattgtatggagacgattttactatctctgcaaagacctcaaacatgtggttctccaaaacctttttcaggaagattaacagtgcggtcagtcgaagcggttgtctgcggttaaatcacgataagacccatctgatctgctcccgcaactctgctcctataattactggcgtgaaaatcactgagtcccacgacaatggcgcaaagctgaccttgacccaaagcactttaaatcactggcgaggggtgattcatcgcgtcacggagatactgtactggaacaatcggcttccacggctagaacaggacggagtgacatttaatcaggccctgggttacgtgaactggattgaggacgtatacagggagtcagaggtacccctttctgtgagaaagccaatcaagtcctttaaagtgcagagcagtaggtttgacaggcgtcgcggatga

SEQ ID NO: 14495 - RNA, 1200 nt, synthetic construct
  source 1..1200: mol_type = other RNA
atgtcccgtaagcaggatgaggtgaagataaaaaacccctttccagctcagccattgttacagcccagaaccctcacaaagatctacaaagagcggagagacgaaatggacgccctggatttcttaggccacatcgtcaaggatcgtcagactatccaggaggcctggcgaattcgcagagagtacaaggatgtgtatgtgctaaagggcaacggagaagtccggatcctgtcagtcccgcctatcaaggttaaaaaggcacagaagatgatactcgagtggttgcgcgacgggaattttatatcctcccacccacgcatccacggcttagtggggagtagctgtttcaactttatcaaaggccactgtgggacctcgcaatatttctacagctttgacataaaacacgcttatgacagtactcctgtgcctctcatctatgaaaaccttctgaggattttgagtaacaaagagtcgctgctgctccgcgcatacttcgaatctgagacgggaaaggggatccaggaactagccaaaaccattatcgagttgactacctactcccaagcgtcacctaaacgaacagaaaacgagaagcagctttccttcctgaaaaggggctccaactcaattctgccccaaggtgcgcctacaagccccgcactcttcttcgttgtgcttaagacaatgatggagaagattgaacgtgatgtaaacttgagcgaacataaactgagctgttatggggacaatttcctgatttcttctcccagtccaattaatcccgaggtagccgaccatgttcttgctatcgtgaaatcatttgggtttaccccccataaaacctttcagcataatattaagcagggcgccctgaaaatctgtggatataccatcgccccaggtaatggtggtaaggataaaacgcgaatcggaattgacaaaagcaccattcggaggatacgcgccctgtgctgcaaggcacaatacactacacgctacaaggatccgcggctctacagaaggctacagggctgcctggcttggattactccagtctatggaggaaatcggcacaatctgccaaatcagatcaagaagcctcttagaaagattggcacacctctgaagtgccagtctaaacagagcaagaggtctttcctgctcaagaaacaaaggcccaagaaaagacgggcttga

SEQ ID NO: 14496 - RNA, 1047 nt, synthetic construct
  source 1..1047: mol_type = other RNA
atgaggcagacacggatagatgaatggtttagcgagacgaagcagaagaagaagctcatcgctaaaattcaaaaggtgtccgccttaaccaagaccaggcccgagtcattttgggaaaagttggagaaagccctgcctctacgaaaagactacagagaggctaaaatccctaagagatctggtggatatagaaccatctacatgccttctccagagctgaaaaaggtacagaaaaatatcctccgctatctgcaggaaatatggcaagtacattatggaccggtgcacggtttatcccccggtggcagctgcgtgaagcatgcacgcatacacagcgcctcgcggtggatttttcagttcgatataaaaaacgcgttcccatctacaaacattataaccctgcggaaactactctcacagatcatccccgtggaggtgaatctcggcgagaacgccactaagattgcctacactcgggctgagcttatcattaagcttaccacttttcaggaaggcctgcctcagggggcacccactagtcctttcttgttctacatcgtgctgacatctaggaagattattccagctacaactgggggcgaaattagacttaccgggctgttctataaactgtggtccgcgtgtccccgaggctacaagatttcctgctacgtcgacggcttcgttatatcagggcccaagcccatcagccctaaaacccaggaaaaaatcttcaaaacgatccgaaaggagagtttcgaaatcaatcagaagaagacacgcattcaggactgccgccacggaaccgttatgatctgtgggctggccgtcgacggaaaagggcgtattagtctccctaagaagacgattcgtaagtggcggggcatcatcggaaaagcaagatttgatccggagaacttggaattgaggcaaaagattgagggctttgtcgcaagcctgaaaccaatctacgaaaaaggaaccccaccgcagatcacaaagccatataataggtatcaacgcgagctggttaaaactacatcctga

SEQ ID NO: 14497 - RNA, 1101 nt, synthetic construct
  source 1..1101: mol_type = other RNA
atgaaaaagttttcctcctttgatggtctgttgtctctcctcgaggactgtagacaatgcgaaatcaagtaccggatcaaaaagatgcctaaaaaaggcgggagcaagcggattatccacgtgccctccaaggaggtaaaagaaattcaatgggagatactggacatcgttaaagcctggcaggtggatgaatgccagtttggcttcagtccaggcaagtcctgtgtcgataacgccctcttccacatccatggctatgatatcaatgcctctggtcgaaagattcaaatcaggggagttcccaggtgggtgctgaaaacggacatcgaggacgctttcccaagcgtgaaacgaaagcatctggagacactgtttcgtgacctatttctgcccctaaaatcctaccctgcatttgtcagcgcgacttcacccgacagggtcgacaagatttacaagaagctggtgtatcagttcgctagactggccacctttaaggggcgcatgcctcaggggagtccttgctcaccctatttattcaatctcgtcttacttcagagcggcatcgtgaaaaagctgaaggataaagcaggagagcgggccaaaaagacaaagggttgtcaggttactgcttataaaatcagcttctacggtgacgatataaccgtgacctcttttaaggaccgcataccaaaccgcttcattaaggagatatcagccattgttgaagaaggcgggattttccggcttaacaatgagaaaacacagagatcttcaaaaaagtaccgatcgatcctcattaatggcatcaccttgaatgataaatggaaggaaggaggaccgtgcttcttgggattgagtaaaaagatacgtaagacctacagggggaagattcacagagtgacagtgatcttagatagcgggcgccttccagaacttgagattgacggcattaacctggagaaagctatgggaatcatttctcggataaaggacgtgtatagaaacgaaagtctgccttccgatctcgagcgcgtactgatcaagttccaggaggcaagaaataacctgatcaggaggactatcaacatcgtctgtatttga

SEQ ID NO: 14498 - RNA, 1251 nt, synthetic construct
  source 1..1251: mol_type = other RNA
atgtggatttcacaggacctgatcgaaaaaaccaaggaagccctgtatgagaaaactaaggatgagagggtgctatgggctagccccttggaaattgtgtgccttgccaagcaaaagaagtgtaaggttgactttaacacgcttctgagatcgttcagcgcgaatcactgcacggcagaggacgtggcaaatctgttcaattatctcaatagtcatggggaggggaatgtggagcgtgaaatgctccttaaggtcatagctgagccagaggagaggaaagtcctgcaggaagtgaagtgtctgatcgacagatactatccaaagcgaaagaagaaccccttagaggggataccgaaaattaaacagtttgtgaccaggttccggaacaaagagcgtcactacagatcttttgccattccaaagaggaatggcggacgccgcatcattgaagcacctactcaggaattggccaacatccaaagattgattctgaaaaagatcctctatcggaaccagatctggaactccaacagtagcgtgcatgggttcgtccctggacgcaatatcctctcaaacgcgagtcttcataaagaggcaaccgttatcgtcagaatcgatcttaaagacgcctttaggaataccaaggaagagatgttggtgaagcacctaaaggagtactttactgaaaaaggcgctaagatcctagtgcgcttatgcacatacaaaggacatctccctcagggggcccctagctcaggcatgctcctgaatttcgtactgggagaactggatggtaagctgaaaaaaattgccgggttcatgggctggcgttacagtagatacgccgatgatttaactttctcctgtgtggaattcaataaacacacagtaggcattggcaagctcatagaaagagtgaaatctatgatcaaagactactcatatcgggtcaatgaagagaaaatccgggttttcaaaaaaaatcgcgccatgcgagtgacaggcctcgtactgaactctggtaagcccaccatcagccggaagtttaggcggaacgtcagggctaaggttcacaactttgttaccaagggtattggaaacgagaaggaggtgctgggatatatttcctatatcaacctggcgaacaagaaatacgctaaaaagctgttgcgaatgatggagaagctgccctccacacacgtaccacgccaggatgctataggcataagctccggtgtcgcatctgagtga

SEQ ID NO: 14499 - RNA, 195 nt, Phocaeicola salanitronis
  source 1..195: mol_type = other RNA; note = Related to NC_015164.1
gctgaaacggaattttgaatttcgtccggcgtatttgcccggatgtctccttgttcttcggaatcatggagataaacaatgttagtacgttaacgtattgcactgtagtacgttgtacttttactatattattatgatgatattttatatgttgtatattatattttatattacataaagaaaagacatttcagc

SEQ ID NO: 14500 - RNA, 182 nt, unidentified
  source 1..182: mol_type = other RNA; note = Related to JAFSKF010000035.1; note = Bacteroidales bacterium
actgaaacggcattttgaatttcgtccggcgtatttgccggatgtctcctcgttcttcggaatcttggagataaacaatgttagtacgttaacgtgttgcactgtagtacgttgtacttttactatattgttattatgctattttatatgttatatattacataaagaaaagaagtttcagc

SEQ ID NO: 14501 - RNA, 191 nt, unidentified
  source 1..191: mol_type = other RNA; note = Related to JAFZXH010000011.1; note = Bacteroidaceae bacterium
actgaagcggcattttgaatttcgtccggcgtatttgtccggatgtctccatgttcttcggaatcctggagataaacaatgttagtgcgtcaacgtgttgcactgtagtacgttgtactttttactatattgttatcatgctattttatctattgtatgttgtacattacataaagaaaagaagtttcagc

SEQ ID NO: 14502 - RNA, 191 nt, Prevotella corporis
  source 1..191: mol_type = other RNA; note = Related to NZ_KQ957209.1
actgaaacggtattttgaaattcgtccggcgtatttgaccggatgtctccttgttcctcggaatcttggagataaacaatgttagtacgttaacgtgttgcactgtagtacgttgtacttttactattattgttatatgtagtttttctatgttatatgttctatattacataaagaaaagatgtttcggt

SEQ ID NO: 14503 - RNA, 186 nt, unidentified
  source 1..186: mol_type = other RNA; note = Related to JAFWZP010000094.1; note = Bacteroidales bacterium
gctaaaatagcattttgaattttgtccagcgtatttgtctggatgtttcctcgttcttcggaatcttggaaataaacaaagttagtatgttaatgtgtacactggaatgtgttatacttttactattgttattatgatattttctattttgtattttttaattacataaagaaaagaaattttggc

SEQ ID NO: 14504 - RNA, 179 nt, unidentified
  source 1..179: mol_type = other RNA; note = Related to JAFSTV010000046.1; note = Bacteroidales bacterium
gttgaaacggcattttgattctgtccagcgtattcgcgggatgtctttgttcgccttaggcgtgacgaagataacaatgtcatttcgtaaactagtcttggaagagactttcttattatgattaatgactatattttattattttttattctttttacataaagaaaagaagttttagc

SEQ ID NO: 14505 - RNA, 225 nt, Phocaeicola dorei
  source 1..225: mol_type = other RNA; note = Related to VVZB01000003.1
accgagatgtcatttgatttttgtccagcgtggtgcaaaccctgctctcgcaagagagtggattcgcgggatatctcttcgcttgccgaggagacgataatgttagtacgttaacgtgataacactgtagtacgatgtactttctattattcatattttatgactttatatatttatattgtctattattattttattctttacataaagaaaggacgttttggt

SEQ ID NO: 14506 - RNA, 227 nt, Phocaeicola sp.
  source 1..227: mol_type = other RNA; note = Related to NZ_JADNRM010000003.1
gccaaaatgttatttgactttttgtccggcgtggtgcaaaccctattttcgcaagagaatagattcgctggatatctcttcgcttgacggggagacgataatgttagtacgttaacgtgataacactttatacgatgtactttctattttttttgtttttatgttttatgactttatatatttatattgtctattattttttttacataaagaaaagacgttttggt

SEQ ID NO: 14507 - RNA, 207 nt, unidentified
  source 1..207: mol_type = other RNA; note = Related to BK014950.1; note = Myoviridae sp.
actgaaacatcatttgaacttttgttcggcgtggtgcaaaccctactcttgaaagagagtagattcgctggatatctcctcgcttgccgaggggacggcaatgttagtacgttaacgtgataacactgtattttctattatttatattatttgaatttatagtatttatagtattgtagtttttacataaagaaaagacgttttggt

SEQ ID NO: 14508 - RNA, 205 nt, Prevotella sp.
  source 1..205: mol_type = other RNA; note = Related to JAFWQO010000014.1
tctgaatcggcattttgaatttcgtccggcgtggcttcagccctgctctttcgggagtagattcgctggatgtctccctgctcttcggagtatgcaggagataacaatgtcaggcagttaacgtgatactgatgtacttacgtactgtttctattatttattatggtatttattttattattacataaagaaaagaagtttcaga

SEQ ID NO: 14509 - RNA, 192 nt, Prevotella bryantii
  source 1..192: mol_type = other RNA; note = Related to FNHC01000010.1
actggaactacattttgaacttcgtcctgcgtattcgcaagatgtctcattgtccttcgggactttgagataaacaatgtcattacgttaacgtatacactaggcatacacagtatgctgttcttgttatgttatgatgtatttatgttatatattatatgttatatttacataaagaaaatcgtttcaggt

SEQ ID NO: 14510 - RNA, 190 nt, Bacteroides sp.
  source 1..190: mol_type = other RNA; note = Related to NZ_JNLA01000055.1
tctggaactacattttgaactttgtcctgcgtattcgcaagatgtctcactgccctttgaggctctgagataaacaatgtcatcatgttaacgtgtacactatacatacatggtatgtttttattgtagatgttatgatgttattatcttagattctatgttatacttacataaagaaaatcgtttcaga

SEQ ID NO: 14511 - RNA, 213 nt, unidentified
  source 1..213: mol_type = other RNA; note = Related to JAGBTN010000007.1; note = Bacteroidaceae bacterium
ctggaattacattttgaaccttcgtccagcgtggcataagccctgccttatcaggtagattcgcaggatgtcttcttgttctaaggaacctgaagataaacaatgttatcacgttaacgttgatacttgacatactatgtatgtttttattgtttttatgttatatattatttatcatatttagtgtatttacataaagaaaagacattccaa

SEQ ID NO: 14512 - RNA, 173 nt, Prevotella sp.
  source 1..173: mol_type = other RNA; note = Related to FR901644.1
agtggacataaatttgaactcgtccgatgtattcgtcggatgtcacctgtcttagtactggtgataaacaatgttatagagtaaacgttgaaaacttgtatgttgtcaattgttttattgtatttattgtatatttttatgttgtatatttacataaagaaatgaactccgct

SEQ ID NO: 14513 - RNA, 203 nt, Aeriscardovia sp.
  source 1..203: mol_type = other RNA; note = Related to JAGAGC010000402.1
actgaaactacattttgaatacgtcctgcgcattcgcaagatgtcttccaacccttcggggttgtgaagataaacaatgttactcggttaacgtgaaacttgaagtacgttgtacttatttctatattattgatataaatagccatccatatatcttaatagccatttatatcatgccgttagataaggaaaatacttttggt

SEQ ID NO: 14514 - RNA, 203 nt, Bacteroides gallinaceum
  source 1..203: mol_type = other RNA; note = Related to NZ_JACJJF010000108.1
ctgaaactacattttgaacttcgtcttgcgtggcgtaagccctgctctttcgggagtggattcgcgggatgtcttcttgctcatctgggcttgaagataacaatgtctgtccgtgaaagctaacattgtttatggcactaactccatcttagattttgatatacttatatagatggatttacataaagaaaagaacgtttcag

SEQ ID NO: 14515 - RNA, 203 nt, unidentified
  source 1..203: mol_type = other RNA; note = Related to DVLS01000070.1; note = Candidatus Avibacteroides faecavium
gccgggatacattttgaactttcgtcctgcgtggcctcgtgccctgcccctcggggtggattcgcgggatgtcccctcgccctctggggcttggggatgacaatgtctgattgtcattagttttacctcatttaaataactttaaaaagttgtatttagaggtatctagagttatttcatacataaagaaaagacgttccggc

SEQ ID NO: 14516 - RNA, 217 nt, Alloprevotella rava
  source 1..217: mol_type = other RNA; note = Related to NZ_JACICA010000001.1
ggcagacataaatttgaattcgtcttgcgggtgaaagccatgctttcttttaagaaggtatattcgcatgatgtctcattatctttcgggatatagagataacaatgttatcacgttaacgtagacttgcacatacgttgtatgtgctttctattgtgttatgttgtttttatatttaatagtcttattttcttatataaagaaatgaatgtctgtc

SEQ ID NO: 14517 - RNA, 209 nt, Prevotella sp.
  source 1..209: mol_type = other RNA; note = Related to JXQI01000021.1
gacagatataaatttgaaaacgtcttgcgggcgaaagccctgtctctttggagacagattcgcatgatgtctcatcgtctttacggccggtgggataatgttatcacgttaacgtagacttcacatacgtagtatgtcttctactcgtgtcttattgttttatatttgtattcttattttattattatataaagaaatgaaagtctgtc

SEQ ID NO: 14518 - RNA, 209 nt, Bacteroides sp.
  source 1..209: mol_type = other RNA; note = Related to HF986315.1
gacaggtataaatttgaacacgtcttgcgggcgcaagccatatttccccggagatacattcgcaagatgtctctaggctttttcaaagccctgagatgacaacgtcatcatgttaacgtagactgtgcatacgcagtatgcctttctatcctgtattgttgtattgtttttatagtattattccttatataaagaaatcaactcctgtc

SEQ ID NO: 14519 - RNA, 206 nt, unidentified
  source 1..206: mol_type = other RNA; note = Related to JAFULJ010000027.1; note = Muribaculaceae bacterium
aactgaactaaaatttgattcaagtcttgcgtattcagcatgacggcttcttctgcagaagaagtaacccaatgttatttggttaacggcgggcttgagtagacaagtctactaatttataaatttataatcaactcaagacttcaatcttaagacttataaatttaagactaacatattaattataaaagaaattatgttcagtt

SEQ ID NO: 14520 - RNA, 234 nt, Prevotella sp.
  source 1..234: mol_type = other RNA; note = Related to JAFRQB010000001.1
actgaaatggcattttgaattatgtcttgcgtggtacaagccctacttcttaagaggtagattcgcaagatatcttcagtctcctcggagttctgaagagaaacaatgtctccatgttaacgttacactatttcgtacgtagtacattgttattgttttgtcgaacaagccttttattcataaaaggtattgtttttatctattcatacttatacaaagaaaagacatttcagt

SEQ ID NO: 14521 - RNA, 223 nt, unidentified
  source 1..223: mol_type = other RNA; note = Related to JAFQZK010000038.1; note = Muribaculaceae bacterium
gctgaaaagccattttgaactttgtcctgcgcattcgcgggatgtccataattccctttgggagttgtggataacaatgttaggcgtgttaacgttcaactgcgtttcactgatgtactgcgtacattgtattatttttagtgattatgatcattatgattatttagatcattatgattatttagatcattgctatattttctgaaagaaaaggctttttagt

SEQ ID NO: 14522 - RNA, 185 nt, unidentified
  source 1..185: mol_type = other RNA; note = Related to JAFXWY010000545.1; note = Bacteroidales bacterium
acctgaaacgatattttgatttcgtcctgcgtattcgcaagatgtccttacgcttccgaaaggaagtaaagggataacaatgttattcggtaatcggatcagcattcatatctatttttatatttatatctgtatcggtatttatatctatacatttatatattattaaggaaaatttgtttcgt

SEQ ID NO: 14523 - RNA, 216 nt, Prevotella sp.
  source 1..216: mol_type = other RNA; note = Related to RKEV01000037.1
agcggatataaatttgattccgtcatgcgtggtgaaagccctggctcttcggaggcagattcgtatgatgtctctttgactcgtaagaggctttgagataacaatgttatatcgtcaacgtagactgtagacatacgcagtatgtcctttctatcgtataatgttgtatatattaatgtttatatgtagttttatataaagaaatgatgctccgca

SEQ ID NO: 14524 - RNA, 176 nt, unidentified
  source 1..176: mol_type = other RNA; note = Related to JAFXTE010000053.1; note = Bacteroidales bacterium
accgaaaatgtattttgaaaccgtccggcgtggctttgccctgcagtagcagattcgcgggatgtcccattctatgaatagggatactaatgttagaatgttatcgtatgattcgtatattcgtatatcgtgatcgtgtgactatattgttgtaaataaagaaaagcagtttcggt

SEQ ID NO: 14525 - RNA, 237 nt, Porphyromonas sp.
  source 1..237: mol_type = other RNA; note = Related to NZ_KV793777.1
agggacataaatttgacttcgtcctgcgggcttaggccgcacctctccggaggtgtattcgcaagatgtctcagactcccctcggggatatgagatagccaatgtttgatcgtgacgatctattttcatatccacgagagaacatccttatttaggggttagatatcctctttcatgatctatttagatgagggtattttattttccgctcacatacataaagaaatgagtgtcctc

SEQ ID NO: 14526 - RNA, 225 nt, unidentified
  source 1..225: mol_type = other RNA; note = Related to JAEUGO010000081.1; note = Muribaculaceae bacterium
gtcgaagcagacattttgaaaatgcccgacgaattgccgggtacttctccctccggggagacttccaatggtcaattggcttctgtgcgattaccgtgtctacttgcggtgcagtggctcctcatccgacaagtcaatcgctttgaatgtacagatttaacaatcaatgattatgaaatctgtattatgaaggtcttacagacataaagaaaacaacgcttcggc

SEQ ID NO: 14527 - RNA, 225 nt, unidentified
  source 1..225: mol_type = other RNA; note = Related to RIBI01000006.1; note = Muribaculaceae bacterium Isolate-102 (HZI)
atcgatgcagacattttgaaaatgcccgacgaattgccgggtacttctcccctcggggggacttccaatggtcaattggcttctatgcgattaccgtgtctacttgcggtgcagtggctcctcatccgacaagttaatcgcgatgaatgtacagatttaacaatcaatgattatgaaatctgtatcatgaaggtctcataagacattagaaaactacgcatcgac

SEQ ID NO: 14528 - RNA, 225 nt, unidentified
  source 1..225: mol_type = other RNA; note = Related to BK020991.1; note = Siphoviridae sp.
gacgaagcagacattttgaacatgcccgacgaattgccgggtatttctccctcggggagatctccaatggtcaattggcttctatgcgattaccgtgtctccttgcggtgcagtggctcctcatccgacaagttaatcgccttgaatgtacagatttaacaatcaatgattatgaaatctgtattatgaaggtcttaaaagacataaagaaaactacgtttcggt

SEQ ID NO: 14529 - RNA, 221 nt, unidentified
  source 1..221: mol_type = other RNA; note = Related to JAGAST010000027.1; note = Muribaculaceae bacterium
gctgaagcagacatttgaacttgcccgacgaattgccgggtactttcccgaaagggaatttccaatggtcaattggcttcctgctgttaacttgcctccttgcggtgcagtggctcctcatacagcaatttagcagccaagaatatcagatttaataataagataattatgaaatctgaaaattgaaggtcttacaagacataaagaaacgaagcttcagc

SEQ ID NO: 14530 - RNA, 201 nt, Sodaliphilus pleomorphus
  source 1..201: mol_type = other RNA; note = Related to VULT01000011.1
ggctaaagaaacattttgaacctgcccggcgattggtcgggtactttcccctcggggaatttccaacggtcagttggctctgggcacttatcacatcatcaagctgatgtgatagtgcgtatgaatctgggaaaattacaccctcctatgtcatagagttaatttctcagccaaagcgaaacaaagaaaatagtcttggcc

SEQ ID NO: 14531 - RNA, 219 nt, Bacteroides sp.
  source 1..219: mol_type = other RNA; note = Related to JAAVDT010000061.1
agtcaaggggacattttgaaattgcccgacgatttgtcgggtactttccccacggggaatttccaacgttctgttggctcctgcgcacttatcgcatctacttgcggtgcagtggctcctcatccgatgagataagtgcccatgaatctgggatgataagatttatgatattatagtcaattactcagacttagggacataaagaaaacagccttggct

SEQ ID NO: 14532 - RNA, 222 nt, Bacteroides sp.
  source 1..222: mol_type = other RNA; note = Related to JAAVCQ010000011.1
agtcaaggggacattttgaacttgctcgacgatttgtcgggtactttcccctcggggaatttccaacgttctgttggctcctacgcacttctcgcatctacttgcggtgcagtggctcctcatccgatgagataagtgccgatgaatctgggaagatgataagatttataatcttatagccaattactcagacttagggacataaagaaaacaaccttggct

SEQ ID NO: 14533 - RNA, 172 nt, Barnesiella viscericola
  source 1..172: mol_type = other RNA; note = Related to NZ_CP007034.1
tcttaatgaaatgaatttgattcccgcctggcgtttagttcaggtgtcctaagcgaaagcttttggatatacaatgttagagttgtaattgtttcactattttgtcataatttgacgggtgatatttttttaagtatatagtgtacataaataaagaaataagtagttaagg

SEQ ID NO: 14534 - RNA, 173 nt, Prevotella sp.
  source 1..173: mol_type = other RNA; note = Related to NPIZ01000015.1
cttgacgaaataaatttgactaccgcctggcgtttagttcaggtgtcctgagcgaaagcttttggatatacaatgttagagttgtaattgtttcactgttttagtcatattatgttatatgatgtgattatagtattatgtagtgtacatatataaagaaataagtagttggg

SEQ ID NO: 14535 - RNA, 174 nt, unidentified
  source 1..174: mol_type = other RNA; note = Related to JAFRTY010000007.1; note = Bacteroidaceae bacterium
cctaactaaatgaatttgactttcgcctgacgtttcgctcaggtgtccatagcgaaagcttttggatatgcaacgttagagttgtaattgtttcactatattttacaagatgtgttatgtagtattttatagtattatgtatattgtacatatataaagaaatgaatagttagc

SEQ ID NO: 14536 - RNA, 172 nt, unidentified
  source 1..172: mol_type = other RNA; note = Related to JAFXXQ010000016.1; note = Bacteroidaceae bacterium
cctgacttaatgaatttgacttccgcctgacgtttagttcaggtgtccagagcgaaagcttttggatatacaatgttagagttgtaattgtttcactgaattattcatgtgttgtactttgttattgtgttattatgtatattatgcatatataaagaaatgaaaagtcagc

SEQ ID NO: 14537 - RNA, 173 nt, Prevotella nanceiensis
  source 1..173: mol_type = other RNA; note = Related to JABZTC010000018.1
tttggtacataaatttgatttagcctaacgttttgtttaggtgtccattgcgcaagctttggataagcaatgtcagggcagtaattgttttactattttttaacattgtgaaagtattatgatattgtttatattattgtatttttacataaataaagaaataaagtacctaa

SEQ ID NO: 14538 - RNA, 159 nt, Phocaeicola sartorii
  source 1..159: mol_type = other RNA; note = Related to JABVZU010000003.1
atgaaatagaaattttgaattagtccggcgtatttgtccggatgtccccaccttggtagggaaaacaaggtttatttgtcattctccgcgtgctccgtgtaccttgaacgttttgcgtgctccgggggcgtgggcatatacaaagaaaatgaattttat

SEQ ID NO: 14539 - RNA, 242 nt, Alistipes sp.
  source 1..242: mol_type = other RNA; note = Related to JAFXAS010000015.1
attgaaatgacattttgatttaggttcgcgtattgcgtaaccagcccgacgaaggtaacttcacagggttaagcaaggttttgctgtcataattatatcctgacatcgagctgtcagtgctataattttttagtaaatctatattgcatatagattagaacttatttgagttttaataaagatatagatgagaataatattaagtttaatattattcatagacaaagaaaagagatttcaat

SEQ ID NO: 14540 - RNA, 325 nt, unidentified
  source 1..325: mol_type = other RNA; note = Related to JAFTUI010000023.1; note = Proposed Tidjanibacter sp.
attgaaatgacattttgatttaggctgtcgtattgtacagctggcccaaaggaggtaacttcaatgggtaaaccaaggtcttgttgttattggacttttgaccgacagttcctgtctgttaaaagtcaagtattctcaataaattgagaacatattaacttaagaagttaatattaaataacaacatatcccttcttcgaagtgatatgggtgatattcaagtctgaacttgaatatcattaagcaaaatactccgtattttgcgtcaagtgagaataattaaactgcgtttacttattcatagacaaagaaaagaaatttcaat

SEQ ID NO: 14541 - RNA, 212 nt, Alistipes sp.
  source 1..212: mol_type = other RNA; note = Related to JAFNYI010000087.1
attgaaacgacattttgacttaggttgtcgtgttgtacaaccgactcttggacccgtctaagagtaaacaaatggcttactgtaattcgtattttgacaatgctcgggcattgcacaaaatacaagtactcttcgagtatctcctacaaccatttatgtttcgtttatttgagaatagttcctattcatagacaaagaaaatatgtttcgat

SEQ ID NO: 14542 - RNA, 164 nt, unidentified
  source 1..164: mol_type = other RNA; note = Related to JAFUSZ010000030.1; note = Bacteroidaceae bacterium
acaaaaccaattttgaaactgtctgccgtattcagcagattcctcttgctttgcaggaggtggcaatgtttgatcgttataggagttactgctctatattgacgtgcaaatgatgcatattgacatgcaaatgattcttcatatacaaagaaaagcggttttgt

SEQ ID NO: 14543 - RNA, 186 nt, Prevotella sp.
  source 1..186: mol_type = other RNA; note = Related to SUYG01000053.1
acagaactgattttgaaattgtctaccgtattcagtagattcctcttgcatatgcttgaggtaacaatgttagattgttatatgtgcttgacgtgcaaagcatacttctgctttccttcgaggcttacaaatttaaatacaaacagtatgttatgtgctatgatatacaaagaaaagcagttctgt

SEQ ID NO: 14544 - RNA, 148 nt, unidentified
  source 1..148: mol_type = other RNA; note = Related to SUWU01000046.1; note = Lentimicrobiaceae bacterium
actgggagagcattttgaatttgttagatgtattcgtctaatatcaaaacaatgttgctattgttatttgaaactagtctttgaaactagtctatagaatattataattgctaaatctaggagcatgtttgaagaaaagaatctcagt

SEQ ID NO: 14545 - RNA, 149 nt, Prevotella sp.
  source 1..149: mol_type = other RNA; note = Related to JAFUDU010000007.1
atgtgagacaaattttgactaccgtccggcgtatttgtccggatgtccctctcaagagggataggttcgtatcattgtcattccgtttaccgtgttcgctggcgttctcgttctgcgttctcgtgtatatacaaagaaaatcctcatgt

SEQ ID NO: 14546 - RNA, 234 nt, unidentified
  source 1..234: mol_type = other RNA; note = Related to JAFRXO010000051.1; note = Bacteroidales bacterium
actggaggagacttttgactttgtccgtcatatttgacggatgtcccgaaagaagggataagagaatgtttgtgcgttacttgcaacaaagtccgatctccctagatcgtctttgtttcatattgagtaaactcaatatattctattttagccggtcataaatgaccggtcgccctacttcccctcctttgtcgattccgacaaagggtgtacacaaagaaaacgatctccagt

SEQ ID NO: 14547 - RNA, 237 nt, unidentified
  source 1..237: mol_type = other RNA; note = Related to JAFQZW010000007.1; note = Bacteroidales bacterium
accgaagcaaacttttgactttcgtctgtcatgtttgacagatgtccgtaaaatcggatactctaaaggtttactcgttactaggaagtgaaatcgcacatagtgctattccacttcagaaatgtgcaaagcacataaagtaaagcctaaacccttcaaattctagactaattaaattattagtcgacagagtcgacgatcgaacaaagttcgtagacaaagaaaacaaacttcggt

SEQ ID NO: 14548 - RNA, 205 nt, unidentified
  source 1..205: mol_type = other RNA; note = Related to JAFZZI010000013.1; note = Bacteroidaceae bacterium
accggagcggacttttgactttcgtctgtcacgtttgacagatgtccgtaaaatcggatacttccaaaggtttactcgttactcgagaagttttacttctccacatatgtgcaagcacatatgagtgatgagatctaaggaatatagttggaactatattccgggactctgacgagtccgtagacaaagaaaaaaacgctccggt

SEQ ID NO: 14549 - RNA, 220 nt, unidentified
  source 1..220: mol_type = other RNA; note = Related to JAFSJL010000028.1; note = Paludibacteraceae bacterium
accagagcaaacttttgattttcgtctgtcatgtttgacagatgtccgtaaaatcggatacttgaaaggtttgtatgttaccctgaagagcaacgacttacagtcctttctcttcataagatgtgcttcgcacattattatggcatattgagatcttagtatattgagactctgtatcccgaactctgcgagtccgtaaacaaagaaaacaagctctggt

SEQ ID NO: 14550 - RNA, 223 nt, unidentified
  source 1..223: mol_type = other RNA; note = Related to JAFUYF010000001.1; note = Bacteroidales bacterium
accggagcagacttttgacttcccgtccgtcatgcttgacggatgtccgggcaaccggacaacacaaaggtttacgcgttactggtcacaagccctgaaatcggagatttcacttcttgtgacttataatgtgacaagcacatttgtggttatatgtgttttattctattgcacgcaatagatcggaatctcgattccgtagacaaagaaaacgacctccggt

SEQ ID NO: 14551 - RNA, 230 nt, unidentified
  source 1..230: mol_type = other RNA; note = Related to JAFZME010000158.1; note = Bacteroidales bacterium
accggagcaaacttttgacttttgcccgtcacgattgacaggtgtccgggaaaccggacaacaccaatgtcgccgcgttacatcgatactgcgcttcaatctgcgatttcgcacagtatcaccatatgtgccttgcacattgagtgtatttatggctgtttagcgctaaggggcgctcaacagcgcagtctcttcgagcctgcattaatacaaagaaaacgaactccggt

SEQ ID NO: 14552 - RNA, 255 nt, unidentified
  source 1..255: mol_type = other RNA; note = Related to JAFUDT010000010.1; note = Bacteroidales bacterium
accgtagcaaacttttgattccagtctgtcatgcttgacagacagtccgggcaaccggataatcctaagggttttgcgttacagcacataactctgtcatcgtgccgatgccatcattctgtgcgattataattatctgaacgagttcagataattgaattaaaagtggaacttttaataggattgtaattgaaaaaaaacgtagtaatcctcttcgagtattactgtgtgtaaacaaagaaaacgaactacggc

SEQ ID NO: 14553 - RNA, 228 nt, unidentified
  source 1..228: mol_type = other RNA; note = Related to JAFYYM010000038.1; note = Bacteroidales bacterium
accggaacaaacttttgacttttgtctgtcatgtttgacagatgtccggctttcgccggaaaaaccaaagggttctgcgttacttcgccacaacgctgcactgcgttccgcattctggcggaatatgtgagcgatgctcacattgtgtggtgatgtatttacggatatagagattctctctctatcccgttctctgaagagaacgtatacaaagaaaacgagtccggt

SEQ ID NO: 14554 - RNA, 202 nt, unidentified
  source 1..202: mol_type = other RNA; note = Related to JAAYJQ010000010.1; note = Bacteroidales bacterium
atcggcctatgcttttgattcccgtccgtcatgtttgactgacttgcctgggcgaccaggcgttcaaaggtccattcgttactcggtgactgcgtcacgtcatattgcttcgcaattgagaaaaatggaactgttgtattattttctaaaaggattggcggaaagacttcgtcattccgtacacaaggaaaacagcgccggt

SEQ ID NO: 14555 - RNA, 234 nt, unidentified; identical to SEQ ID NO: 14546
  source 1..234: mol_type = other RNA; note = Related to JAFRXO010000051.1; note = Bacteroidales bacterium

SEQ ID NO: 14556 - RNA, 207 nt, unidentified
  source 1..207: mol_type = other RNA; note = Related to JAFYOT010000249.1; note = Bacteroidales bacterium
cctgaatcagattttgatcttccgtctgttgtattcgacagatatccaggtccgcctggatgagtaatgttatagcgtaacagtttcatctgaagctgaaacaatatatatattactatgtaatgaatataatattacacaatattatatattatttcagattaaacggtaacaagttacctgtacacaaagaaaagacgattcagg

SEQ ID NO: 14557 - RNA, 172 nt, unidentified
  source 1..172: mol_type = other RNA; note = Related to JAGBVU010000006.1; note = Bacteroidales bacterium
actagaataggattttgaatagccgtctgtcgtattcgatagatatccagtatactggatgaaaaatgtatcttcgtaatatgttgtatatatactttgtatgacattacatgtagtatgatatgttaaacggtaacaagttacctatacacaaagaaaagagaattctagt

SEQ ID NO: 14558 - RNA, 155 nt, unidentified
  source 1..155: mol_type = other RNA; note = Related to JAFZIR010000019.1; note = Bacteroidales bacterium
tctgaaatggcattttgaaaactgtctggcgtcttgccagatttccaggtcaaactggaaaagcaatgttagtgcgttattgttttaaggtgtttggatgagtttggatgttattatagtgatatatggcatatacaaagaaaacgaatttcaga

SEQ ID NO: 14559 - RNA, 183 nt, Prevotella sp.
  source 1..183: mol_type = other RNA; note = Related to NZ_CP091788.1
acaggaatgaacttttgacttgtagcccgtcgtatttgacaggtggcctggtagcaatactgggtaagaacaatgttagattgttattatttcatatctgtgtgagtttttactagaacgacaagtagaagtagacaagaacacagacaagattttcatatacaaagaaaacgaagttcctga

SEQ ID NO: 14560 - RNA, 168 nt, unidentified
  source 1..168: mol_type = other RNA; note = Related to JAFRRT010000017.1; note = Muribaculaceae bacterium
atgtgaaacaaattttgaattctggtccgatgctactgtcggatgtcattcttctaaaaaaagaattgataaaccaaggttatattttattacagtctttgactgatttgtagagaacctcattttaaactgttcaagattacaaaaacaaagaaaaagagttcgcat

SEQ ID NO: 14561 - RNA, 161 nt, unidentified
  source 1..161: mol_type = other RNA; note = Related to JAGCXD010000267.1; note = Paludibacteraceae bacterium
atgcaaaacaaattttgaattctggtccgatgctatcgtcggatgtcattcttctaaaaaaagaattgataaaccaaggttatattttattacagtctttgactgatttgttgtgtatatagtgcactcattacaacaaacacaaagaaaaacgtttgcat

SEQ ID NO: 14562 - RNA, 173 nt, unidentified
  source 1..173: mol_type = other RNA; note = Related to JAGCXD010000191.1; note = Paludibacteraceae bacterium
gttggcagaaaaattttgactctggctcgatggtatcgtcgagtgtcattcttctaaaaaaagaattgataaatcaatgttatattttattacagtcatagactgatttatagctgtgatattcgtgttattacctatatctctttataaatacaaagaaaatatatgccatt

SEQ ID NO: 14563 - RNA, 166 nt, Prevotella sp.
  source 1..166: mol_type = other RNA; note = Related to FR900399.1
aatgctacacaaattttgattctggtccgacgtgcgtcggatgtcattcttctaaaaaaagaattgataaaccaacgttttatttaattacagtcgtacgactgatttggcttaattcaaatataaagtcaatagtataaagtacacaaagaaaattaatagcatt

SEQ ID NO: 14564 - RNA, 165 nt, unidentified
  source 1..165: mol_type = other RNA; note = Related to JAFPVK010000006.1; note = Bacteroidales bacterium
gtaagcaacaaaatttgactcttgtccgatgctcttcgtcggatgtcattctcctaaaaaaagaattgacaaactcaatgttttgttttaatactgacaagtcagttatattccgtatatacttatattatggaccaacacaatacaaagaaatgagatgctttc

SEQ ID NO: 14565 - RNA, 160 nt, unidentified
  source 1..160: mol_type = other RNA; note = Related to JAFZLC010000057.1; note = Paludibacteraceae bacterium
acggaagaaacgaattttgactcttgtccgatgatatcgtcggatgtcattcttaaaaaagaattgacaaatcaatgttagatttcatctgtgatgaacttatagaattattcactacagaataaaaacgtttaaatacaaagaaaatagtaacttccgt

SEQ ID NO: 14566 - RNA, 180 nt, unidentified
  source 1..180: mol_type = other RNA; note = Related to JAAVFW010000009.1; note = Bacteroidales bacterium
gccaaacaaattttgattctcgtccgacgtgtgtcggatgtcattctttcaaaaaaagaatgataaaaacgttatattttattacagtcaaaagactgatttattattgtaaatgaatttaaaagatcaaaatctaattaattcagatagcaaaaataaaacaaagaaaagagtattggc

SEQ ID NO: 14567 - RNA, 173 nt, Bacteroides sp.
  source 1..173: mol_type = other RNA; note = Related to JAAVDW010000016.1
gccaaacaaattttgacttccgtccgacgtgtgtcggatgtcattcttttaaaaaaaaagaatgtaaacccaacggtatattttattacagtcatagactgatttattatgtcttgatcttaatgatatttcataaagaagataataataaaaacaaagaaaagagaactggc

SEQ ID NO: 14568 - RNA, 175 nt, Bacteroides sp.
  source 1..175: mol_type = other RNA; note = Related to JAAVCY010000011.1
gccaaacaaattttgactcccgtccgacgtgtgtcggatgtcattcttataaaaaaagaatgataacccaacggtatatttttgttacagtcatggactgatttatgcttaataacttagtgatttaaatttaaacttagccttaagacataaaaacaaagaaaaggatattgac

SEQ ID NO: 14569 - RNA, 166 nt, unidentified
  source 1..166: mol_type = other RNA; note = Related to MNQI01000006.1; note = Bacteroidales bacterium 43_36
agccaaacaaattttgactcgcgtccgacgtgtgtcggatgtcattctttcaaaaaaaagaatgataacccaagggtatattttattacagtcgtagactgatttattctttatgaatgttaatttcaaaaagacaagaatagaaacaaagaaaagagtattggct

SEQ ID NO: 14570 - RNA, 183 nt, Barnesiella sp.
  source 1..183: mol_type = other RNA; note = Related to JAAVFD010000014.1
accaaacaaattttgactctagtccgacgtgtgtcggatgtcattcttttttaaagaatgataacccaacggtatatttttttacagtctttgactgatttattgatttttataataattattaaaattattgatttttctaattactttcaaaaatcttaaaacaaagaaaagagtattggc

SEQ ID NO: 14571 - RNA, 173 nt, unidentified
  source 1..173: mol_type = other RNA; note = Related to JAFUKZ010000065.1; note = Muribaculaceae bacterium
gtacaaacaaattttgacttttgtccgattgttttgtcggatgtctttcttttaaaaaaaagaaagataaccaaatggtatatttaatttacagtcgttggactgatttggtgtaatttcattttctcatgcacaacgaagaaaggaaaaatacaaagaaaaggaatttgtat

SEQ ID NO: 14572 - RNA, 165 nt, unidentified
  source 1..165: mol_type = other RNA; note = Related to JAFYUK010000058.1; note = Muribaculaceae bacterium
acacaacaaattttgatttatgtccgattgttttgtcggatatctttctttcaaaaaaaggaaggataacctaatggtatattttatttacagtccagtggactgatttgtatttctcaatcacaatgaagaaaggaataaaacacaaagaaaaggaatttgtat

SEQ ID NO: 14573 - RNA, 200 nt, unidentified
  source 1..200: mol_type = other RNA; note = Related to JAAVBM010000118.1; note = unidentified bacterium
aaccgatcaaacttttgacttttgcccgccgttgctctactactttagtgggctaagatcttccgatcgaggcgggtgttccaatttaaggcactgttccggatgtgcccaaaaaaggaataaatcaatgtcgtagattgatcttcgatcttaaaagatgattgtaacatctctataaacacaaagaaaagccatcggtt

SEQ ID NO: 14574 - RNA, 164 nt, Veillonella sp.
  source 1..164: mol_type = other RNA; note = Related to JABUTH010000081.1
ctctcagccaaactttgaccctgtctgctgttactggcagatgccacatgtaaatgatggcaaataacaatgttatatcggtttttcgtaccgaattgttatattatgataatttaaaagataagttgttatctgatatcaacacaaagaaagcaagctgagag

SEQ ID NO: 14575 - RNA, 228 nt, unidentified; identical to SEQ ID NO: 14553
  source 1..228: mol_type = other RNA; note = Related to JAFYYM010000038.1; note = Bacteroidales bacterium

SEQ ID NO: 14576 - RNA, 232 nt, unidentified
  source 1..232: mol_type = other RNA; note = Related to JACXTV010000190.1; note = Campylobacterales bacterium
atccataaatattgaatgatatgctgtattcggcataagccccaaacttttaaagttactgggttaatgttttaagttaattttaaaaactaaaaactaaagaataaaatgtgtatcgtacattgggttaacgttttaacttaattttgataactaaaaacgaaagaataaatgtattcaatgcatcatgcacaatgaatatattgccatacacaatgaatagattatggat

SEQ ID NO: 14577 - RNA, 191 nt, Chryseobacterium gregarium
  source 1..191: mol_type = other RNA; note = Related to NZ_KE387264.1
gtttgcacgaaattttgattttgccagttgttataaatttttatttataattatatgattggtctgttttagatgaaagtctagaactgaatgttattttaagttattcttactagatttactatttaactgtttttactatatttttctaattttaattttatctcataaacaaagaaaatattgcagac

SEQ ID NO: 14578 - RNA, 219 nt, Mucilaginibacter rubeus
  source 1..219: mol_type = other RNA; note = Related to NZ_BMKD01000001.1
gctcatcaaaattttgaaatatgtctgctgttcggctatggtcgaaaaatcggcaggcagttatctgtaaggcatagcttttccgataactgaaagtgaacactgtaattttatacaggttacacttatttacctgatagtttataaattatatgctttccagccataccattatacgggtgattcggtgttgcatacacaaagaaaaagatggtgagc

SEQ ID NO: 14579 - RNA, 241 nt, Pontibacter arcticus
  source 1..241: mol_type = other RNA; note = Related to NZ_QMDV01000006.1
gcctgctctaagattttgatttatgccagctgtcgcgtaggagcaatcctacgtgaaaatcggctggtaccctgtagcaatatggggtgaaagttagaatcgtcattgtatcagtctgcattgacatttactagctttttgagtccacttatcatgacttatattttatatttattatataggatttataagctgttttaagtagattgttaaatcataaacaaagaaaatacgagcaggc

SEQ ID NO: 14580 - RNA, 248 nt, Pontibacter flavimaris
  source 1..248: mol_type = other RNA; note = Related to NZ_LVWA01000005.1
gcctgctctaagattttgatttttgccagctgtcatgcaggagcaatcctgtgtgaaaatcggctggtgtcccatagcaatatgggatgaaagcaacaatttggtcattgtagaccagttttgttgttaaagttgaggcccagtctgttatacattttgttatccactcttgtataccagttatgctgtttttttccccctcattctttttttcgagtttctcataaacaaagaaaacacgagcaggc

SEQ ID NO: 14581 - RNA, 239 nt, Rufibacter roseus
  source 1..239: mol_type = other RNA; note = Related to NZ_LRML01000007.1
gcctgctctaagattttgatttttgccaactgtcgtggcggagaaatccaaaacgaaaatcggttggtgtcccgcagccatgcgggatgaaggtttaagtgtcatttgtctgttactagatgactgtcatttagattttattattgattatttatgatttatatgttattatgagatatgagtcgtctttaatcaacttctttgacttaaggtcataaacaaagaaaacaagagcaggc

SEQ ID NO: 14582 - RNA, 188 nt, Chryseobacterium viscerum
  source 1..188: mol_type = other RNA; note = Related to PPEG02000007.1
gaccgcttaagattttgatttcgcctgctgtattcggttggcagtcccaaagtaactttggggctaaaagttagatagttatttctctttacgatttttgactattactattttttatatattttatatttaatttatgttatgatttttcttgaaatgatttcataaacaaagaaaatacagcgggc

SEQ ID NO: 14583 - RNA, 188 nt, Chryseobacterium luteum
  source 1..188: mol_type = other RNA; note = Related to NZ_JPRO01000006.1
gaccgcttaagattttgatttcgcctgctgtattcggttggctgtctcaaaagtaattttggggctaaaagttagatagttatttctctttacgatttttgactattacgatttttatatattttatatttaatttatgtcatgatttttcctgaaatgatttcataaacaaagaaaatacagcgggc

SEQ ID NO: 14584 - RNA, 210 nt, Flavobacterium collinsii
  source 1..210: mol_type = other RNA; note = Related to QJQY01000044.1
atccgcttaagattttgatttcgcctgctgtactcggttggctgtctcagaattaattttgaggctaaaagttagatagttatttttctctgtgattttaattactttggttttatctattttttcattttattttttttctattttgtctttattttatttttttatttatattttaagggtttcataaacaaagaaaacacagcggac

SEQ ID NO: 14585 - RNA, 196 nt, Flavobacterium sp.
  source 1..196: mol_type = other RNA; note = Related to NZ_VAHC01000003.1
atccgcttaagattttgatttcgcctgctgtactcggttggcagtctcagaattatttttgaggctaaaagttagatagttattttttctatgatttttaattactcttggttttatctattttttttattttgtctttattttatttttatattaatattttaagggtttcataaacaaagaaaacacagcggac

SEQ ID NO: 14586 - RNA, 217 nt, Flexibacter sp.
  source 1..217: mol_type = other RNA; note = Related to MTQF01000001.1
gtccgctgaagattttgattttgccaactgtttattatgtaagtaataaaaaaccggttggatggttttcaggattaatcctgaaaactgaatgtattattggtcattcctggccatatgtgctttttatgccttcaagttattatttttaattgcttttattctattaatatatttataatttttctgggccatacacaaagaaaacaaagcggac

SEQ ID NO: 14587 - RNA, 246 nt, Flavobacterium sp.
  source 1..246: mol_type = other RNA; note = Related to NZ_OU957226.1
accgtagtgaaatattgaaatgtctatcgcaagataggcttgcctgctggaaatattatttttaatattttaaattggctggtagtttcagagtaatctggaactgaatgttagtgatgtgattttaggaacattgatacaatgttgtttcaaaaccctcaccttttttgataaattatttctttaattattttagattttaatttatgatctttggatacatagagaaagaataacaactacggt

SEQ ID NO: 14588 - RNA, 242 nt, Flavobacterium sp.
  source 1..242: mol_type = other RNA; note = Related to JABSNN010000002.1
accgtagtgaaaatattgaattgcctagtgaaaactaggcttgccaactggaaaaagtactcgtacgttttcaaatcggttggtggttgtagagcaatctataactgaatgttagtgatgtaatttttgggatagtaaaccttctctcaaaaccctcacttatatgttgattatgaattttatgttttattattttaattttaatttaatgaagatacatacataaagaatactactacggt

SEQ ID NO: 14589 - RNA, 217 nt, Polaribacter pectinis
  source 1..217: mol_type = other RNA; note = Related to NZ_CP060695.1
accgtagtataaaaaattgattacctgtttaggcaggtgttctgctgtattcggcagtaggttgcagtttactgtaactaaatgttattatcgttattgtattgaagttaagtcttcttatagtaatatttttttatatttttttaagtattatttttttaattatttataattattaatttattacaattcataaagaaagaattgatgctgcggt

SEQ ID NO: 14590 - RNA, 225 nt, Mariniflexile fucanivorans
  source 1..225: mol_type = other RNA; note = Related to NZ_SLUP01000001.1
accgtagttaaaaaattgaattgcctgcttcggcaggtagtctgctgtattcggcagatggttgcagtttactgcaactaaatgttagagatgttattgtaacctagttcaaaaccctcactttttttagtttttaatattttattattatttattttaatagtgaaatctactttcaaagctatttaatttttaaagtcatagagaaagaattaaagctacggt

SEQ ID NO: 14591 - RNA, 233 nt, Gilvibacter sp.
  source 1..233: mol_type = other RNA; note = Related to NZ_CP019333.1
actgaagtcactgtattgacccgcctgccttcgggcaggtattctgctgtattcggcagaatgttgtagccatgctacaactgaatgttagaggagttattttgactgatttcttttaagaaaccacaaaaacaaccctcactttttattgctatgatttttattatcatggtaagtcatggcaaggctatttttagcatatggagccatagataaagagtatatacttcagt

SEQ ID NO: 14592 - RNA, 212 nt, unidentified
  source 1..212: mol_type = other RNA; note = Related to NZ_JAFIDN010000022.1; note = Proposed Natronogracilivirgula saccharolytica
gcccacacaagatattgaaactgcacgctgtattcggcgtgtctgtccggcgttaagtgttgcaacacttgccgggctgaatgtcagtacttgatttgcaggtagatcaggtaaggttatactttacatgagatacatgtgaatagggactattgactgtatactattattattaatgatagttcattcatacataaagaatatcagtgggc

SEQ ID NO: 14593 - RNA, 185 nt, unidentified
  source 1..185: mol_type = other RNA; note = Related to SEFL01001225.1; note = Sphingobacteriales bacterium
gcagatagcctgggggcttgctcccaggcgaaatgttctaaatgtaatttttttagcgcttttattatttttcgctatagaacttgaaactattgaacattattaattatttattatttatcgatattagctattgcagttattagagattgatagttttcatacacaaagaataaggggcgggc

SEQ ID NO: 14594 - RNA, 203 nt, Tenacibaculum ovolyticum
  source 1..203: mol_type = other RNA; note = Related to NZ_BDCW01000118.1
acctgctgtacaatattgattttgccaactggaaattatttttttaaaatttcaatgatcggttggtgttccgaatttattcggaatgaatgttatttttgttaaatatctttttgaagttattattagaatgatctatttcttaaattattctttttaatattctttaaataattcctaaattaaagaataaaacagcaggt

SEQ ID NO: 14595 - RNA, 266 nt, Polaribacter sp.
  source 1..266: mol_type = other RNA; note = Related to NZ_JHZZ01000001.1
acctgctgtaaaatattgatttttgccaactggtaattaaacttttaagttttgtttcaacgatcggttggtatctcagtaattatccgacaaccggaatttcggatactgagatgaatgttatttaaggttattgtgttagccttttagagtaacttttataaattattcttttaagatatatttttattattatttcttttaagatatatttttaaattattttttaagtaatttattcataaacaaagagtatagcagcaggt

SEQ ID NO: 14596 - RNA, 198 nt, Haliscomenobacter hydrossis
  source 1..198: mol_type = other RNA; note = Related to NC_015510.1
gcctgtctaaagatattgatcgtgcatgctgtatttcggcatgtctcctggcttttagccaggtgaacgttttgaggtcattgttgaagatgattggtcatctgcttgtttattgtgatgataaataatgatggttgatttgtttttgatgatgatatggttgaattttactccatacgaaagagtatcatggcaggc

SEQ ID NO: 14597 - RNA, 212 nt, unidentified
  source 1..212: mol_type = other RNA; note = Related to JACJYR010000001.1; note = Lewinellaceae bacterium
gcctgcctgaaagatattgaacgtgcatgctgtatttcggcatgtcttcccggttcccgggatgaatgttagcgttgtcattgtcagtattgtgctttctattgtcattttcatttttatgaaatgatgatgtgattgatgatattgctgatgatgaatgagtgctgttattgcagttctcatggttcatacgaaagagtatcacggcaggc

SEQ ID NO: 14598 - RNA, 216 nt, unidentified
  source 1..216: mol_type = other RNA; note = Related to NZ_JAAORA010000001.1; note = Candidatus Chlorobium masyuteum
gcctgccgcaagatattgactagtgccagctggggttaatcgaaagatgtatccagatcggctggtgtcccgaagcaattcgggatgaaggttcccgggttattagttggatctcagattgtaatgatttttttttacgatttgatttctacctactaaaccccgtatctaatttgaattcttttcaaagtcatacacgaagaatatgcggcaggt

SEQ ID NO: 14599 - RNA, 246 nt, unidentified
  source 1..246: mol_type = other RNA; note = Related to JADJUM010000002.1; note = Saprospiraceae bacterium
gtctgatgtacaagatattgattagtgccatctggaaaaggtcgaaaggtttttcaaatcggatggtgtttcaggttcgcctgaaatgaatgtatctatataattgattcgtcgaaagttgaaatttgtcgatctaacgatagctttttaataattcgtgaattaaattattgataattatttattttgaatttatgtatatataaatgtatgtaaatatcataaacaaagagtatgacatcagac

SEQ ID NO: 14600 - RNA, 200 nt, unidentified
  source 1..200: mol_type = other RNA; note = Related to JACJZT010000003.1; note = Flavobacteriales bacterium
gcctgttgtaagatattgatttttgccaactggaaattatcgtaaggtagtatcagatcggttggtgtcttcaaggtaacttgaggatgaatgtttaaaagtaattactctagcaatttacttctggtaatgcttaacttaaaattattaacctttaatttttaatacaagttccataaacaaagagtatagcaacgggc

SEQ ID NO: 14601 - RNA, 179 nt, Chryseobacterium sp.
  source 1..179: mol_type = other RNA; note = Related to SEAO01000392.1
acctgttaacaaatattgaatttgctagacggactggtggtaacgccaatcataatgagctagtggttaagacgtgtgttttaactgaatgtctatggaatattcccatcagaacaccttatactttaatcagttttatgaaattgatattgttacatatacaaagaatagagacaggc

SEQ ID NO: 14602 - RNA, 187 nt, Pedobacter sp.
  source 1..187: mol_type = other RNA; note = Related to NZ_JAFVME010000001.1
gcctgctgaaatgtattgaatttgccagttggaggtttgtaacctcagatcaactggtagctggtaacttaagaagttatgcagctgaaggtttgtatcggtcattacttgacacgtttttacctgatattatgaaatccttatgatctctttatacttgcatatacaaagaataattcacgcaggc

SEQ ID NO: 14603 - RNA, 197 nt, Aquirufa sp.
  source 1..197: mol_type = other RNA; note = Related to NZ_CP049834.1
gtctgccgtaacaaattgaaattcgccatttggagattgtataaatctcaaatcggatggtattctggatatttcaggatgaatgtttcttggtttttatataatatttaaaaattaagaatattattatttttattattttaatattatttgggaaaataatatttagatcatatacaaagaatttcacggcagac

SEQ ID NO: 14604 - RNA, 259 nt, Chryseobacterium sp.
  source 1..259: mol_type = other RNA; note = Related to NZ_CP094531.1
gcctgttttaagattttgattttgcctgctgttggagatttttccaaaaaccggcaggtgttccgaaagtttgcactttcggaataaaggttaggtgattatttattgtcgattttcttcagttgagattttatttattatttcaatagaattttattattatatatttcaacgtgggtctacgcccaaaaactgatattagtaaaaaccctcacttattttttttataattgaatagataaagaaaacagaaacaggc

SEQ ID NO: 14605 - RNA, 263 nt, Chryseobacterium balustinum
  source 1..263: mol_type = other RNA; note = Related to CP033935.1
gcctgttttaagattttgattttgcctgctgttggaagttttcccaaaaatcggcaggtgttccggagatgtaaatcttcggaataaaggtttggtgatcatttattgtagatttttcttcagttgagatttatttatttattatttcaataggaattttattattatttatttcgatggggcgctacgcacaacaactgatctcagtaaaaaccctcacttatttttttataattgaatagataaagaaaacaaaaacaggc

SEQ ID NO: 14606 - RNA, 264 nt, Chryseobacterium sp.
  source 1..264: mol_type = other RNA; note = Related to VOXE01000004.1
gcctgttttttagattttgatttcgcctactgttttttgtaggtattcctggcgaagctagggatgatgaaggtttcttttataaattgatttagatttataggtcttagtagactgaggatattattttataataattggtaatattattttagtagatcattggttttactttattacatcttgaatttttgatcaatttaatttcagaagtaccctcacttattttagcaattgaatatataaagaaaacacaaaacaggc

SEQ ID NO: 14607 - RNA, 241 nt, Kaistella jeonii
  source 1..241: mol_type = other RNA; note = Related to NZ_LR134503.1
gcctgtttttaagattttgatttcgcttgctgttgggtctcccaaaaatcggcaagtgttccggaaattattttccggaatgaaagtttggactttatagtaattagagagaattttgattaacaatattttaatatatattattatttatattttgttgtcaggattgccctcgctcattacgctgtcctttcttataccttatttaaagtcgaatagataaagaaaacaaaagacaggc

SEQ ID NO: 14608 - RNA, 237 nt, Chryseobacterium sp.
  source 1..237: mol_type = other RNA; note = Related to JAFIBT010000001.1
gcccgtttaaattttgactacgcctactgttttttgtaggtattccaatttattggaataaattaatggattagttagcagcacatatatatacgataatatttttatattaatttaacttttactatttataaattatcttaaattttatatgaattttgttaactaacatttatatgatgattatcaattatgctttttggctatcttaaataaaataaagaaaaacaaacgggt

SEQ ID NO: 14609 - RNA, 233 nt, unidentified
  source 1..233: mol_type = other RNA; note = Related to JADJJD010000012.1; note = Saprospiraceae bacterium
acttgcctcaagatattgattcgtgggtgctgggagtaattgagaaatcaatgaaacaatgatcggcatctttatcctgatctcggttgggatgaatgtcactaagacatacgccattgtggatgttggcctaataaccaatcgtctgaacttaagatgtaattattagtgataaatagttaataagtcttccttcaactgtatcctgtatacaaaaagagtatccggcaagt

SEQ ID NO: 14610 - RNA, 231 nt, Algoriphagus aquaeductus
  source 1..231: mol_type = other RNA; note = Related to QKTX01000002.1
acctgcctaaggtattgattcgtgggtgctggtcccgagtaatcgggacatgatcggcatcttttcccggcccaaagtcgggatgaatgtccctcgggcattattgaagcgttttgcctcctctcggggatgtgaagcttttggttgattctgtataaaaagttctttatgaatttattgataaagaatatacaaagattcatttccatacaaatagagtatcaggcaggt

SEQ ID NO: 14611 - RNA, 240 nt, unidentified
  source 1..240: mol_type = other RNA; note = Related to JADZFD010000065.1; note = Saprospiraceae bacterium
acttgccacaagatattgattcgtgggtgctgggagtaactggataaccagtgaaacaatgatcggcatcttctcccgacctctggtcgggatgaatgtcacttagcatttttaacatggattgttgattttaaaataaaaaatcaatagaaacaaattgttattaatataaaaagtgaacaataggtatcgaatttagctgcagctgaattatccatacaaaaagagtatccggcaggt

SEQ ID NO: 14612 - RNA, 213 nt, unidentified
  source 1..213: mol_type = other RNA; note = Related to VGMK01000021.1; note = Bacteroidetes bacterium
acttgccagaaggtattgattcgtgggtgctggtctcaaatttcggtttgagacatgatcggcatcttctcccgacctgtgttgggatgaatgtcacttaggaatttattgcagtgtgtattgatttcaatgtcaatatgaaattgttatttatgaatttattagtgattaataggtattgatttatacatacaaatagagtatcaggcaggt

SEQ ID NO: 14613 - RNA, 237 nt, Flavobacterium cyanobacteriorum
  source 1..237: mol_type = other RNA; note = Related to NZ_NOXV01000174.1
acttgccacaagatattgattcgtgggtgctggtctcagatttcggtttgagacaatgatcggcatcttctcccaacctctggttgggatgaatgtcacttaggcatttttaacagcggttattgatttcaatatcaataatatgaagttgttattgatgtaattattagtgatgaataggtattgatttcagttgtaatgattgaaatattcatacaaaaagagtatccggcaggt

SEQ ID NO: 14614 - RNA, 230 nt, Elizabethkingia miricola
  source 1..230: mol_type = other RNA; note = Related to QNTX01000003.1
acttgccacaagatattgatttgtgggtgctggttctagatttcggtttggaacattgatcggcatcttctcccgaccactggttgggatgaatgtcacttaggtatttttaacagcttattgattttaataatttattagttgttattatgtatttatttgtgatttattgatttagaatttcagttatttttattgaaatattcatacaaaaagaatatttggcaggt

SEQ ID NO: 14615 - RNA, 308 nt, unidentified
  source 1..308: mol_type = other RNA; note = Related to JAGPCT010000008.1; note = Saprospiraceae bacterium
acttgccacaagatattgattcgtgggtgctggaagtaactggttaaccagtgaaacaatgatcggcatcttctccctacctatggtagggatgaatgtcacttaggcatttctaacagcggaaacaataatcggcatcttctcccaaactgtggtagggatgaatgtcgcttaggcatttctaacaacggttattgataagaagaacaataatattaagttgtaattgatgtaattcttagtgatgaatatcgattgaatttcagttcatgtaattgaaatacatacaaaaagagtatcaggcaagt

SEQ ID NO: 14616 - RNA, 229 nt, unidentified
  source 1..229: mol_type = other RNA; note = Related to JAAZMS010000454.1; note = Bacteroidales bacterium
acttgccacaagatattgattcgtgggtgctggttccgaattatcggaacaatgatcggcatcttctctcaacctttggttgggatgaatgtcactagagtcatttttaacagtgcttaactattgattctctgcagaactgttatttatgaattattctttattctgctgaattaacttagcttaagctgaggctgaattattcataccaatagagtatccggcaggt

SEQ ID NO: 14617 - RNA, 241 nt, unidentified
  source 1..241: mol_type = other RNA; note = Related to NZQO01000147.1; note = Flavobacteriaceae bacterium
acctgtcctaagatattgaaacgtgggtgctggctctagatattgttctaaggcaatgatcggcatcttctcccgaccactagtcgggatgaaggtcacttaggcattttgatcagctctgttattaatctcagtatttataatatgaagttgtcattgatgtatttataagtgatgaataggtattgcacttcagttgaaatgattgaaatgttcatacaaatagagtatccgggcgggt

SEQ ID NO: 14618 - RNA, 232 nt, Echinicola pacifica
  source 1..232: mol_type = other RNA; note = Related to BMWX01000006.1
acctgccgtaaggtattgattcgtgggtgctgtcccggttttctgggaaacgatcggcatccttttccttccaaaagggccggccagcccggagggaatgaaggttatattggtaaaacacagattcatcatccagcttttgctgaactcttgggtttctgtttttttattatgttatgtatggatttaggtaatcaacattacttcaatacacatagaatatctggcaggt

SEQ ID NO: 14619 - RNA, 231 nt, Echinicola sp.
  source 1..231: mol_type = other RNA; note = Related to NZ_CP080025.1
acctgcctaaaggtattgattcgtgggtgctgtcccggtttcccgggaaaagatcggcacctctttcccttcatatgggccggccagcccggagggattgaatgttattttggtaaactccaatcgacttcccttgtgttgttcttcctttggatatcgattattgtttatgatgatatatggattgatgaaatatacacacattcattacaaatagaatatccggcaggt

SEQ ID NO: 14620 - RNA, 268 nt, Echinicola sp.
  source 1..268: mol_type = other RNA; note = Related to NZ_JACYTQ010000004.1
acctgtccgaagatattgattcgtggatgctggcttattcatttaagtatggatcgagcaatgatcggcatcttttccctaccatttgggttggccagcccggtagggaagaatgtttctacttgaataattaatggttttcatctttagttatattagctattgaacttgactgttattatttatgatattgatgtattttctggagtttaagctaatttattttagcacagaatcatcatccttacaaaaagagtatccgacaggt

SEQ ID NO: 14621 - RNA, 237 nt, unidentified
  source 1..237: mol_type = other RNA; note = Related to JADYZM010000024.1; note = Flavobacteriales bacterium
acttgccacaagatattgattcgtgggtgctggaagtagttgggaaaccaatgaaacaatgatcggcatcttctcccgacctctggttgggatgaatgtcactgagacatttttaccagctactattgatttcaacgtcaataatataatgttgttattaatgtaattattagtgaagaataggtattgaatttagctatagctgaaacattcatacaaaaagagtatcaggcaagt

SEQ ID NO: 14622 - RNA, 236 nt, Tenuifilum thalassicum
  source 1..236: mol_type = other RNA; note = Related to NZ_CP041345.1
acttgcctaaagatattgatttgtgggtgctggcctaaatttgtttaggcaatgatcggcatcttattccaacttttgttggaatgaatgtcagagtggcattaatgagcacagtttctgagcataacttcagaactgagatttacattgacgccagtaataacgctgactaagaataacccctaattaaattttttttttttggtctttaatacttatagagtatcagggcaggt

SEQ ID NO: 14623 - RNA, 247 nt, unidentified
  source 1..247: mol_type = other RNA; note = Related to QMPL01000018.1; note = Bacteroidetes bacterium
acctgccaaaagatattgactcgtgcatgtcggttttgttgcttgcaacaaaacaatgatcgccatgttttcccgaccttttggtcgggatgaatgtctctgatgaattaatagctggttgtcatattatatctgaaatgatatgatgcaatgaaactgttattgatgaatttattagtgatgaataggattacggatttcagttaataaagctggaatattcatacataaagagtatcgtgtaggt

SEQ ID NO: 14624 - RNA, 242 nt, unidentified
  source 1..242: mol_type = other RNA; note = Related to JAGPFM010000063.1; note = Bacteroidales bacterium
acttgcctaaagatattgactcgtgcatgctggttttgttggcgacaacgaatcaatgattggcatgttctcccgacctctggttgggatgaatgtccctgacgaatttataacggctaatgtcttgtaatagaggtttattataagatatgaagttgttattgatgaatttttcagtgatgatagaaatcgaattcaattgaaatgttgaattgttcatacataaagagtatcaggcaggt

SEQ ID NO: 14625 - RNA, 208 nt, Cyclobacterium sp.
  source 1..208: mol_type = other RNA; note = Related to NZ_WOFO01000011.1
acctgccaaaaggtattgattcgttggtgctgttccgggtaactggaaactgatcggcaccttttcccagaaagttctgggatgaacgttccttaggaatgatcaagctccttaataggatttaaacttttctggttttgaagacgatgatatgtttgataaataaaaataccacagattcttcataccaatagaatatccggcaggt

SEQ ID NO: 14626 - RNA, 217 nt, Mariniradius saccharolyticus
  source 1..217: mol_type = other RNA; note = Related to AMZY02000008.1
acctgccaaaggtattgatctgtgggtgctgtttcggtttatcgaaaagatcggcacctgttcccgacatttgttgggataaatgtctcttgggaattttccaactcctgagtagacttctgacctccatttggtcctttgatagtttagtctttatagatattttatgtatttataattacacaaattcatcatacgcatagaatatcaggcaggt

SEQ ID NO: 14627 - RNA, 220 nt, unidentified
  source 1..220: mol_type = other RNA; note = Related to JADJXZ010000008.1; note = Crocinitomicaceae bacterium
acctgtcctatgatattgatcgtgggtgctggtctcagatttcggtttgagacaatgatcggcatcctgtcctgcaaatctaggatgaatgtaatgaagcattgtgtcatcaatggcgttcggtaacgggtcatcaacccatccgaaatgttttattatttattaatttatagattttggtgatattattatcaacacacaaaaagagtatcggacaggt

SEQ ID NO: 14628 - RNA, 219 nt, unidentified
  source 1..219: mol_type = other RNA; note = Related to JAJTAY010000029.1; note = Bacteroidia bacterium
acctgccacaagatattgacccgtggatgccgggagtaggtccgctggcccggactgaaacaatgatcggcatctcttcccggatgttttccgggatgaatgtccatgaggcattgtagtcagttgctattgattgaataatcataatagcaattgatatcatgataaatgaattagtaatcattatcatgatacatacataaagagtatcaggcaggt

SEQ ID NO: 14629 - RNA, 252 nt, unidentified
  source 1..252: mol_type = other RNA; note = Related to DOXR01000029.1; note = Bacteroidales bacterium
acctgcctaagatattgattccggatgctgggagtaattgggaaaccaatgaaacaatgatcggcatctcttcccgcccttgaggtccttgtggcacttgtggctgggataaatgtccattggacatgtctggagcctgcatagcatttatagcaatgaatgaaattcaagatatgaagctatgtaagctagatatgattgagatcttgtgagatcaagcacgagctcatacataaagagtatcaggcaggt

SEQ ID NO: 14630 - RNA, 202 nt, unidentified
  source 1..202: mol_type = other RNA; note = Related to JAHUUM010000008.1; note = Weeksellaceae bacterium TAE3-ERU29
acctgtcaaaagatattgatttcggatgttggtttcaattttaaaattgaaacagatcggcatcttctctactcggtagaggctgaatgttaggaggtaaattcaatatagatttaagatatatttttatattttaatcctatctaatttacccccactaatttatttcaagttaatttatacaaaaagaatatcgataggt

SEQ ID NO: 14631 - RNA, 262 nt, Nitritalea halalkaliphila
  source 1..262: mol_type = other RNA; note = Related to NZ_AJYA01000040.1
acctgccataagatattgattcgcgggtgctggccctgctctggcagggcaatgatcggcatctattcccaatcgcgtattgggatgcatgtgtggagagcattctcaatttaaatgaaacagtatatatgtatactattcatttaaaatgcgccattaacattctaatttaccccgctactggggaaatagacctttgacagtgtcgatacacaggtatcggggtcatcggtcctacatacaaatagagtatccggcaggt

SEQ ID NO: 14632 - RNA, 214 nt, Lewinella maritima
  source 1..214: mol_type = other RNA; note = Related to NZ_CAKLPZ010000001.1
gctcgcccagaagatattgactcgtgggtgctggttctagctacggctcggaacaacgatcggcacctcttccctgatttcggtccgggatgaacggttttcagttgaggatctagatagatgcagatgaatgaacgtataacgcttatttatttatgcatataggtgtacgctttaggattagagtgtggcacaaatagagtatcgggcgagt

SEQ ID NO: 14633 - RNA, 196 nt, Lewinella antarctica
  source 1..196: mol_type = other RNA; note = Related to NZ_JAATJH010000004.1
gcctcaagatattgattcgtggatgctggcactggttccgaccggtgcaatgatcggcatctcttccgggctactagtccggtcgaatggcccagagagatttgggctcttttgaggatcttaatcaataaatgattatggtttttatgaatttatgaggatttaaagcttcatacaaatagagtatcggacgggt

SEQ ID NO: 14634 - RNA, 247 nt, unidentified
  source 1..247: mol_type = other RNA; note = Related to PXTU01000456.1; note = Bacteroidetes bacterium SW_10_40_5
acctgcctaagctattgattcgtgcgtgctggttcgctttttggcggacaatgatcggcacgtgagtccggctttatgccgggctgaatgtcaaaagggcattttgtcggctactgccttgattaaatctccttattcttcttggaaagggatgttatgaataaggcttagcaatgctttaattgatatatttatttataaattatataaacatacttttccatacggagagaatacaaaggcaggt

SEQ ID NO: 14635 - RNA, 258 nt, Bizionia paragorgiae
  source 1..258: mol_type = other RNA; note = Related to NZ_FNQK01000004.1
acctaaacaaaagtattgatcgcgtatgctggtttaattagtagtaattaaacaacgatcggcatatattctaatcgtttattcgattggaataagaatgttatttttaattagtccacaatgtttaaaacacataattggttctaattatttatagcatttattatattttttatattattattatatattatttcaatgtaatattaataagatatgtaaagtttaaaatcatacaaaaagaatagacgtttaggt

SEQ ID NO: 14636 - RNA, 273 nt, Psychroserpens sp.
  source 1..273: mol_type = other RNA; note = Related to NZ_CP039451.1
acctaaacaaaagtattgatcgcgtatgctggtttaattagtaataattaaacaacgatcggcatatattctaatcgtgtattcgattagaataagaatgttaattattaattagtccacaatgtttaaaacacaaaaaatggtttaatttttaaatagatagcattatattatttatatattatttagttctattattattattattattattattatttagatctatttatattaagtttaaaatcatacaaaaagaatagacgtttaggt

SEQ ID NO: 14637 - RNA, 257 nt, Maribacter ulvicola
  source 1..257: mol_type = other RNA; note = Related to FTMA01000004.1
cccaaactgaaattattgaaagcatatgctggcctgatgattaattcaaaggcaataatcggcatataatcctatagaaatataggatgaatgttatttgttaattgtaaatagacatggcaaataaagaaaagacttttatgtttttgataacattgtcattatttcatttacagttcatataatttatttttttttaaaggcttgaatgctactaaggttttcaatcgtcatacaaaatgaataaaaggtttggg

SEQ ID NO: 14638 - RNA, 251 nt, Antarcticibacterium arcticum
  source 1..251: mol_type = other RNA; note = Related to NZ_CP042476.1
acctgcccgaaagatattgactttgggtgctggtcctgaaattatcaggacaatgattggcacctgtacccgactttatgtcggcaaaatgttagcggatgatttagacctcgtttcaaaacatccactgataattttattatgattttattatttttaattaagatctgttttattattaagacaaaagttaaagttattaatgacttagtttttgaattataacatacataaagagtatcggggcaggt

SEQ ID NO: 14639 - RNA, 238 nt, Gramella sp.
  source 1..238: mol_type = other RNA; note = Related to JAJSON010000015.1
acctgcccacagagatattgaatttgggtgctggtcctgaaattatcaggacaatgatcggcatctttacccgacttttagtcggccaaaggttagtgaggaattgaatcctaaatttcaaaacctccacttattatttttttatgatttattattataaactatttcaagacaaatgaattagttctgattattgaaattgctttataatatatacttaaagagtatccgggcaggt

SEQ ID NO: 14640 - RNA, 199 nt, unidentified
  source 1..199: mol_type = other RNA; note = Related to DMXI01000354.1; note = Microscillaceae bacterium
acctgtctaaaatattgatttggtgctgtcttgatcctatcaagaagatcggcatcggtttccagtctctcacgggattgggaaaggtttatttagacatcataagtttatttcaaaaatggctcgaaaaaccttaataataaataaataattaataacaatttattacggttacatacataaggaatacaagacaggt

SEQ ID NO: 14641 - RNA, 244 nt, Kaistella daneshvariae
  source 1..244: mol_type = other RNA; note = Related to NZ_RJUG01000002.1
atctgcattattgaattttgattgctgggagtaactgcaaagtgaaacaatgatcggcaatcggctctttattccgtaaggtgtagggagcataatgttagttgacaattttttgcagttaacatatttggcaatttagctgaatggctattatctttttatcttttattatctttttaacattaggtacattggcatttagacatttcggttaacgattcatacataaagaatacatgcagat

SEQ ID NO: 14642 - RNA, 239 nt, unidentified
  source 1..239: mol_type = other RNA; note = Related to JAAFAH010000017.1; note = unidentified bacterium
aactgccgaaaggtattgaattatggatgctaccccatatggggtttaaagattggcatctttgtccggtttaccggactgaatgtttctataaaattatgtttaggatttctaactaattttaaagaatctattattaaatgaatatttattttaattgaatatttattgaaaaaacttaacatttcttttgaaataatttaagttaatatattcatacacaaagagtactggcagtt

SEQ ID NO: 14643 - RNA, 246 nt, Capnocytophaga sp.
  source 1..246: mol_type = other RNA; note = Related to ALNN01000005.1
acctgtgagtatattgatttctttgattgctggaagtttgagttatccctttttggatgatttaagtttcaggtcggcaattggcttaggattttcctaagtataaggttaccaatggatcaagataaatatagctatattatattgatattgatttatattgatattgaaaatatcatttttcttgatttcataagaaccttctctggtatattatattcatacaagtagaatagaaatacaggt

SEQ ID NO: 14644 - RNA, 210 nt, unidentified
  source 1..210: mol_type = other RNA; note = Related to JAACZX010000460.1; note = Chitinophagaceae bacterium
accggttaaatgttttgacttcgcagggcgtatcgccctgtagctttttccagtaacggaaaaaggaaaagttctttatagtcgaattgtgctgttgagaactattttggcctattaacccccgttaatttttgttttaattgggaataatagatatgtatttgatgtttttatgtctgttggacctggacatcatagaaaacaaccggt

SEQ ID NO: 14645 - RNA, 201 nt, unidentified
  source 1..201: mol_type = other RNA; note = Related to JAFDXN010000025.1; note = Bacteroidetes bacterium
gcctgctaacgaaattgattttcgcctgttggccttcgggcagatcgacaggctgtctgtttcctgcaaaggaggcagatgaatgtatctgtagtcattagtagcaatactgcttttaagatttaagatataattgatatttttattattgataatagtcttagttggctatgttcatgtagaaagagttttacggcaggc

SEQ ID NO: 14646 - RNA, 236 nt, unidentified
  source 1..236: mol_type = other RNA; note = Related to JACJYQ010000002.1; note = Lewinellaceae bacterium
gcccgcttgaagatattgaatcgtgcatgctggacttatccatttaggaataagtcagatcggcatgctactctgtatcgggtttccggtacggaggtaatgttctttggtcattgattagtattgaaattcattgtatgttatttattaatataataattaatttataatatataataagaattcattattaatagatgcctttaattttcatacaaaaggaatattgtgcgggt

SEQ ID NO: 14647 - RNA, 225 nt, unidentified
  source 1..225: mol_type = other RNA; note = Related to JAGOPY010000019.1; note = Bacteroidales bacterium
gcctgcccataatattgaacgtgcgcgaccgtttcggagcgttttcccgactttgtcgggatgaatgtcataacatgatttgtcgttgtgaaacgattaattaattgacgttttgtattgtgaataatagaaaggtgaatagaaatgtgaagattattttttttctcattttttaataattcataccctctcttaatttcattcataaagaatagaccggcaggc

SEQ ID NO: 14648 - RNA, 222 nt, unidentified
  source 1..222: mol_type = other RNA; note = Related to JAFGOZ010000659.1; note = Bacteroidales bacterium
gcctgctcagagatattgaacgcgcatgctggtcccgccctcgggcgggacagatcggcatgtttccctgacttcggtcggggtgaatggtttctggttatagaaattgactgcggaagcatcacaagctgacgcttaaactcattcgtaacttcaaaccataaacacttaagccattagcatcgctaatgctaatacatacataaagaatattgagcaggc

SEQ ID NO: 14649 - RNA, 194 nt, Spirosoma sp.
  source 1..194: mol_type = other RNA; note = Related to JACMPG010000245.1
gcctgttccgacaggtattgattttctgcacgtgcgtttcgccgtgtggccccggcgcaagctgcgggctgactgtaattgggtaattgatactgattatgattattgaacatgatcttagttattattaattatttaaattattagtagtaaaaagaagattgtgcatacataaagagtaccggcctactggc

SEQ ID NO: 14650 - RNA, 194 nt, Spirosoma sp.
  source 1..194: mol_type = other RNA; note = Related to NZ_JACXAA010000017.1
gcctgtcctaaggtattgattgtgtgcacgtgcgtttcgctgtgtagtctggtgtaagccggactgaatgtagttgggtaattggtggtgttgatggttgaagtgaatgctctttaactgttggcctggactgtattactttaattatattattaattattgtatgcttattcatacataaagagtaccgaggc

SEQ ID NO: 14651 - RNA, 193 nt, Arcicella aurantiaca
  source 1..193: mol_type = other RNA; note = Related to NZ_QGGO01000004.1
agacacccacaaggtattgatttttgcaaagcgtttcgctttgtggtttaggcattgttctaaacgtaatgttatgtgttaacatcgttgcaagacatttgtgacgtatttagacatattactattatatatattatttatttaataatgtgggaagtaggttcaattcatacaaaagaatacgtgggtgtct

SEQ ID NO: 14652 - RNA, 217 nt, unidentified
  source 1..217: mol_type = other RNA; note = Related to JADJRO010000003.1; note = Saprospiraceae bacterium
gccaacaaaaagattttgaactgttcattgcgatttgcaatgtcggccagcaatggctgtttaaatggtagttattttaattgttcagcattgagctataatgaacatttagttattgaatatatcagtaattaatatattataataaaatatgaataaatgaatattgccatcattgaatttatgatggattcatccataaagaaaatcagttggc

SEQ ID NO: 14653 - RNA, 197 nt, Hymenobacter sp.
  source 1..197: mol_type = other RNA; note = Related to NZ_JNLX01000031.1
atctgcgttagggcttttgaccccgtgcggcgttgcgccgcgcccgtttaaacaacggcagtaatgacagtaaacgaaattgattaaaatgatttaattgattttttgtcattattatctttttgaatagttgatgatttttatcaattatttatttcttatacaataagtataggatatgaaaattcccagcagat

SEQ ID NO: 14654 - RNA, 201 nt, Hymenobacter elongatus
  source 1..201: mol_type = other RNA; note = Related to NZ_SRLD01000019.1
acctgtgactggggttttgaccttgtgcggcgttgcgccgcgcccgttctgacaacggcatcattgacagttgactcgattgattaatttgatttaattaattgatttgattgactctgaattgagttttaattcagaatttattttttgaattattatctgcttcttaagtagaagacgcaaagaaaactcccggcaggc

SEQ ID NO: 14655 - RNA, 199 nt, Hymenobacter rubripertinctus
  source 1..199: mol_type = other RNA; note = Related to NZ_QYCN01000007.1
acctgtgactggggttttgaccttgtgcggcgttgcgccgcgcccgttttgataacggtatcattgacagttgacttgattaatttttatttaattaattgattttattgtctttgaattgagtctttattcagaatttattttgaattatcatctgctttccttgaagtagaagacgcaaagaagactcccgacaggt

SEQ ID NO: 14656 - RNA, 219 nt, unidentified
  source 1..219: mol_type = other RNA; note = Related to JADKEM010000006.1; note = Bacteroidetes bacterium
acctgcggaaaggattttatttgtgttgcgtttcgcaacatgctccacaatgtgatttcattgtagattataattgtaatgattatgatgttagcgatgtagctgtaattgtgattattgtattaattgtttttaattgtttagttattattaattaatcattgatagagattattaatgtaattagatatagaaattaagaaaagaaatcccgcaggt

SEQ ID NO: 14657 - RNA, 128 nt, Brucella anthropi
  source 1..128: mol_type = other RNA; note = Related to NZ_WBWZ01000001.1
aaaattacgaggtctcccctcgcatacgcgctgtagtaactgcggcgtaagaagaaatacaagtacaatatcgtacgctccatgtcgacaatctatgcttgacatgattggagggagacctcgtgcca

SEQ ID NO: 14658 - RNA, 128 nt, Brucella sp.
  source 1..128: mol_type = other RNA; note = Related to NZ_LT599047.1
attggcacgaggtctcccctcgcatacgcgctgtagtaactgcggcgtaagaacgaatgaatttacaatatcgtgcgcgccactcggactttgtggacctggcgtgattggagggagacctcgtgcca

SEQ ID NO: 14659 - RNA, 75 nt, Rhizobium azooxidifex
  source 1..75: mol_type = other RNA; note = Related to NZ_JACIEE010000022.1
cgagatacgaggtctcccctcgcatacgcgctgtcgtaactgcggcgtaagagcgagaggcggaactccgcaaaa

SEQ ID NO: 14660 - RNA, 129 nt, Ensifer sp.
  source 1..129: mol_type = other RNA; note = Related to NZ_CP083370.1
ttcggcacgaggtctcccctcgcatacgcgctgtaggaactgcggcgtaagagcgaatgtatctacaatatcgtgcgcgccacgtatgcctgaatgcacatggcgtgattggagggagacctcgtgcca

SEQ ID NO: 14661 - RNA, 127 nt, Agrobacterium sp.
  source 1..127: mol_type = other RNA; note = Related to MEDN01000012.1
cagattacgaggtctcccctcgcatacgcgctgtagtaactgcggcgtaagagctaacgtattcacaatgacgtgcgcgccgtgcacctatatgcacctggcgtgattggagggagacctcgtgcca

SEQ ID NO: 14662 - RNA, 131 nt, Agrobacterium rhizogenes
  source 1..131: mol_type = other RNA; note = Related to SGOC01000001.1
ttgagcacgaggtctcccctcgcatacgcgctgtcgtaactgcagcgtaagagctcaagtcctaaacaagatcgttgcgcgccacactatgctctgtgcacctggcgtgattggagggagacctcgtgcca

SEQ ID NO: 14663 - RNA, 131 nt, Rhizobium leguminosarum
  source 1..131: mol_type = other RNA; note = Related to WIEG01000017.1
tcgcacacgaggtctcccctcgcatacgcgctgtcgtaactgcggcgtaagagctcaagtcctaaacaagatcgttgcgcgccacactatgctctgtgcatctggcgtgattggagggagacctcgtgcct

SEQ ID NO: 14664 - RNA, 127 nt, Rhizobium leguminosarum
  source 1..127: mol_type = other RNA; note = Related to SIJW01000001.1
tacagcacgaggtctcccctcgcatacgcgctgtcgtaactgcggcgtaagagcaaacgtacctacaatatcgtgcgcgccacttaatgcttcgagcatggcgtgattggagggagacctcgtgcta

SEQ ID NO: 14665 - RNA, 132 nt, unidentified
  source 1..132: mol_type = other RNA; note = Related to JAIUOD010000004.1; note = Proteobacteria bacterium
aagatttcgaggtctcccctcgcatacgcgctgttgtaactgcggcgtaagagtaaatgtcatttcaaggatcgtgttgcgccactgatcttcggattatcttggcgtgattggaagggagacctcgtgctg

SEQ ID NO: 14666 - RNA, 131 nt, Brucella intermedia
  source 1..131: mol_type = other RNA; note = Related to WBWG01000001.1
gcgcctacgaggtctcccctcgcatacgcgctgtagtaactgcggcgtaagagctaacgtcgaatatagaatcgttacgccccatgatgtaatgacgcaacgggggtgattggaagggggacctcgtgcac

SEQ ID NO: 14667 - RNA, 131 nt, Bradyrhizobium sp.
  source 1..131: mol_type = other RNA; note = Related to VKHP01000048.1
gaatttacgaggtctcccctcgcatacgcgctgtcgtaactgcggcgtaagagcgaaagtctcatcaaggatcttgcgcgccacgttgctcgctgaatgcctggcgtgattggaagggagacctcgtgccc

SEQ ID NO: 14668 - RNA, 131 nt, Ensifer sp.
  source 1..131: mol_type = other RNA; note = Related to NZ_LUFV01000044.1
atgtccacgaggtctcccctcgcatacgcgctgtcgaaactgcggcgtaagagtaaacggcaactacaatatcgttcgcgcgcccaaaaccttatgaagcggggcgtgattggaagggagacctcgtgaca

SEQ ID NO: 14669 - RNA, 131 nt, Qipengyuania nanhaisediminis
  source 1..131: mol_type = other RNA; note = Related to NZ_FOWZ01000002.1
gtccgaacgaggtctcccctcgcatacgcgctgtagcaactgcggcgtaagagcaaatgtctagacatgtcgtgcgcgccatgacgattgatgattaaccgtggcgtgattggaagggagacctcgtgact

SEQ ID NO: 14670 - RNA, 132 nt, Sphingomonas sp.
  source 1..132: mol_type = other RNA; note = Related to SLXW01000017.1
agctggacgaggtctcccctcgcatacgcgctgtagtaactgcggcgtaagagcaaatgtctagatatgtcgtgcgcgccatgacgattgattgattgaccgtggcgtgattggaagggagacctcgtgccc

SEQ ID NO: 14671 - RNA, 131 nt, Sphingopyxis sp.
  source 1..131: mol_type = other RNA; note = Related to NZ_CP039250.1
cggagaacggggtctcccttcgcatacgcgctgtagtaactgcggcgtaagagtaaaagtctagatatgtcgtgcgcgccatgaatatcgattgataaccgtggcgtgattggaagggagacctcgtgccg

SEQ ID NO: 14672 - RNA, 128 nt, Sphingopyxis sp.
  source 1..128: mol_type = other RNA; note = Related to MIAM01000006.1
aggcgcacggggtctcccctcgcatacgcgctgtcgtaactgcggcgtgagagtcaatgtctagaagaaatcgtacgcgccgccgtatcacggagccatggcgtgattggaagggagactccgtgcca

SEQ ID NO: 14673 - RNA, 129 nt, Acetobacter tropicalis
  source 1..129: mol_type = other RNA; note = Related to NZ_LHZT01000034.1
cgttagacggggttctcccctcgcatacgcgctgtagtaactgcggcgtaagagtaaacgtctgtgcatatcgtgatcgcccggatcatctgtttgacttggcgtgattggaagggagaccccgtgcca

SEQ ID NO: 14674 - RNA, 130 nt, Sphingobium yanoikuyae
  source 1..130: mol_type = other RNA; note = Related to NZ_JH992904.1
tctcttacggggttctcccctcgcatacgcgctgtagtaactgcggcgtaagagtaaatgtctgcacatatcatgcccgccatgatcattcggtaattcctggcgtgactggaagggagaccccgtgcca

SEQ ID NO: 14675 - RNA, 128 nt, Sphingomonas corticis
  source 1..128: mol_type = other RNA; note = Related to JAAVJH010000001.1
cattctacggggtctccccctcgcatacgcgctgtagaaactgcggcgtaagagtcaaagtctgcacctatcgtgcccgccgaatgcccttgggtgcaccggcgtgattggaaggggaccccgtgcca

SEQ ID NO: 14676 - RNA, 129 nt, Sphingomonas sp.
  source 1..129: mol_type = other RNA; note = Related to NZ_JACYUG010000002.1
aaaatcacggggtctcccctcgcatacgcgctgtagcaactgcggcgtaagagtaaaagtcagcacacatcgtgcgcgccgtatgctccttgtgggccctggcgtgattggaagggagaccccgtgcta

SEQ ID NO: 14677 - RNA, 130 nt, Actibacterium ureilyticum
  source 1..130: mol_type = other RNA; note = Related to NZ_NSBT01000026.1
gctctcacgaggtttcccctcgcaaacgcgctgtcgtaactgcggcgtaagagcaaatgtctgcacaagaatcgtgcgccccacatgagcttcgtgcacatggggtgattggagggggagcctcgtgcct

SEQ ID NO: 14678 - RNA, 130 nt, Litorivita pollutaquae
  source 1..130: mol_type = other RNA; note = Related to QFVT01000013.1
tgatgtacgaggtttcccctcgcaaacgcgctgtcgtaactgcggcgtaagagcaaaagtctgcacaagaaacgtgcgcccaacatgagctatgtgcacatggggcgattggaggggaaacctcgtgcca

SEQ ID NO: 14679 - RNA, 129 nt, Sulfitobacter sp.
  source 1..129: mol_type = other RNA; note = Related to CH959310.1
tgacctacgaggtttcccctcgcaaacgcgctgtcgtaactgcggcgtaagagcaaaagtctgcacaagaaacgtgcgcccaacatgagctatgtgcacatggggtgattggaggggaacctcgtgcca

SEQ ID NO: 14680 - RNA, 129 nt, Leisingera sp.
  source 1..129: mol_type = other RNA; note = Related to NZ_JAKFZM010000082.1
agaggcacgaggtttcccctcgcaaacgcgctgtcgtaactgcggcgtaagagcaaatgtctgcacaagaaacgtgcgcccccagttgaccttgagccatggggtgattggaggggggacctcgtgcac

SEQ ID NO: 14681 - RNA, 129 nt, unidentified
  source 1..129: mol_type = other RNA; note = Related to JACZKS010000020.1; note = Rhodospirillales bacterium
cgcgccgcgaggtcttccttcgcatacgcgctgtagcaactgcggcgtaagagctaatgtctgcacaaatcgtgcatgccggaggatgtgcgtcaatcctggcgtgattggaaggaaggcctcgtgtcc

SEQ ID NO: 14682 - RNA, 127 nt, unidentified
  source 1..127: mol_type = other RNA; note = Related to JADGCC010000015.1; note = Alphaproteobacteria bacterium
tgtgctgcgaggtcttccttcgcatacgcgctgttgtaactgcggcgtaagagctaatgtctgcacatatcgcgggtcgcgcgcatgattcttagcgacgcgtgattggaaggaaggcctcgtgaca

SEQ ID NO: 14683 - RNA, 130 nt, unidentified
  source 1..130: mol_type = other RNA; note = Related to WHTM01000007.1; note = Hyphomicrobiales bacterium
gatgttgcgaggcctccccttcgcatacgcgctgtcgtaactgcggcgtaagagctaatgtctgcagatatcttgcgcgccctatgacctatgtgacccgggcgtgattggaaggggaggtctcgtgccg

SEQ ID NO: 14684 - RNA, 126 nt, unidentified
  source 1..126: mol_type = other RNA; note = Related to JAIEST010000134.1; note = Beijerinckiaceae bacterium
gagccggcgagatctcccttcgcatacgcgctgtagcaactgcggcgtaagagctaatgtctggataaatcgtggcgcgccgctctattgggcgccggcgatgattggaggggagatctcgtgcct

SEQ ID NO: 14685 - RNA, 131 nt, Rhodovibrio sodomensis
  source 1..131: mol_type = other RNA; note = Related to NZ_NRRL01000154.1
tcaccagcggggtttcccttcgcatacgcgctgtcgtaaccgcggcgtaagatgaaacgtctgcacatatcgtgcacgctggccaatggtctttgtggctccggcgtgattggaagggaaaccccgtgcca

SEQ ID NO: 14686 - RNA, 130 nt, Acidisphaera sp.
  source 1..130: mol_type = other RNA; note = Related to NZ_LMUJ01000012.1
gattgcgcgaggtctcccttcgcatacgcgctgtcgtaacctgcggcgtaagagctaatgtcagcacagatcgggcgcgccatacgatgattgatgcgcgcggcgtgactggaaaggagacctcgtgccg

SEQ ID NO: 14687 - RNA, 126 nt, Mesorhizobium sp.
  source 1..126: mol_type = other RNA; note = Related to SUEQ01000018.1
gggtcaacggggtctcccttcgcatacgggctgtgcaactgcggcctaagagctcatgtctggacatatcgagcgcgccgttcgacccggagcaactggcgtgattggaagggagacctcgtgcca

SEQ ID NO: 14688 - RNA, 126 nt, unidentified
  source 1..126: mol_type = other RNA; note = Related to REES01000140.1; note = Rhodospirillales bacterium
gtcgcaacggggtctcccttcgcatacgggctgtgcaactgcggcctaagagcgaacgtctggacacatcgagcgcgccgttcgacactgggtggctggcgtgattggaagggagaccccgtgcca

SEQ ID NO: 14689 - RNA, 126 nt, Sphingomonas sp.
  source 1..126: mol_type = other RNA; note = Related to RCVT01000005.1
attttgacggggtctcccttcgcatacgggctgtgaaactgcggcctaagagcgaatgtctagacgcatcgtgcccgccgagcgacactgggcgactggcgtgattggaagggagatcccgtgctt

SEQ ID NO: 14690 - RNA, 123 nt, Sphingomonas olei
  source 1..123: mol_type = other RNA; note = Related to NZ_SSTI01000022.1
tccctagcgaggtctcccttcgcatacgggctgtgcaactgcggcctaagagcgaatgtctgcacacatcattgcgcgccattcgatggaccgtggcgtgattggaagggagacctcgtgtcg

SEQ ID NO: 14691 - RNA, 126 nt, Rhizorhabdus sp.
  source 1..126: mol_type = other RNA; note = Related to JAGMXV010000066.1
cgtccaacggggtctcccttcgcatacgggctgtgcaactgcggcctaagagcgaaagtctagacacatcgagcgcgctgcccgttaatgggcgactggcgtgattggaagggagacctcgtgtcg

SEQ ID NO: 14692 - RNA, 126 nt, Sphingopyxis granuli
  source 1..126: mol_type = other RNA; note = Related to NZ_CP093335.1
atgccaacggggtcttccttcgcatacgggctgtgcaactgcggcctaagagcgaatgtctggacacatcgagcgcgcagctctttacggggcgactggcgtgattggaagggagacctcgtgcca

SEQ ID NO: 14693 - RNA, 125 nt, Brevundimonas sp.
  source 1..125: mol_type = other RNA; note = Related to CP038440.1
agccgggcggggtctcccttcgcatacgggctgtgcaactgcggcctaagagcgaacgtctccacacatcgtgcccgcgcgtgcttcatggcaacctcgcggattggaagggggacctcgtgaca

SEQ ID NO: 14694 - RNA, 124 nt, Aquibium oceanicum
  source 1..124: mol_type = other RNA; note = Related to NZ_CP018171.1
agctggacggggccactcttcgcatacgggctgtgtaactgcggcctaagagcaaacgtctcgacatatcttgcccgccgagtgcttgtggcgagcggcgtgattggaagggggccccgtgcca

SEQ ID NO: 14695 - RNA, 128 nt, Breoghania corrubedonensis
  source 1..128: mol_type = other RNA; note = Related to NZ_QAYG01000015.1
cggtctacgaggtctcccctcgcatacgcgctgtgcaactgcggcgtaagagctaatgtctcgatatatcgtgcgcgccatcgtaacctggtgtgacttggcgtgattggaagggagacctcgtgccg

SEQ ID NO: 14696 - RNA, 129 nt, Methylobacterium sp.
  source 1..129: mol_type = other RNA; note = Related to JAIETD010000062.1
ccgtgtacgaggtctcccttcgcatacgcgctgtgcaactgcggcgtaagagctaatgtctggggataacgtgcgcgccaccctaatcttgtgtgaccgtggcgtgattggaagggagacctcgtgccg

SEQ ID NO: 14697 - RNA, 127 nt, unidentified
  source 1..127: mol_type = other RNA; note = Related to JAFBAI010000383.1; note = Xanthobacteraceae bacterium
acgaccacgaggtctcccctcgcatacgcgctgtgcaactgcggcgtaagagtgaatgtctcgagaggacgtgcgcgccatacggctattacgtgagtggcgtgattggaggggagacctcgtgcca

SEQ ID NO: 14698 - RNA, 127 nt, Erythrobacter sp.
  source 1..127: mol_type = other RNA; note = Related to NZ_CP021912.1
ccctgggcgggatatctcttcgcatacgcgctgtgcaactgcggcgtaagagctaacgtcaacgcaaatcgtgcgcgccgaggcttctcgggaacccgggcgtgattggaagagatatcccgtgcca

SEQ ID NO: 14699 - RNA, 127 nt, unidentified
  source 1..127: mol_type = other RNA; note = Related to JAGOQV010000032.1; note = Alphaproteobacteria bacterium
tgttttacggggtctcccctcgcatacgcgctgtgataactgcggcgtaagagctaatgtctagtacaaatcgtgcgcgccaacgtgttatgcgtgcttggcgtgattggagggagacctcgtgcat

SEQ ID NO: 14700 - RNA, 128 nt, Mesorhizobium sp.
  source 1..128: mol_type = other RNA; note = Related to SUEX01000026.1
tcccttacgaggtctcccctcgcatacgcgctgtagtaactgcggcgtaagagctaacgtctgcacagatcgtgcgcgccaatcgactatgcgacacttggcgtgattggaagggagacctcgtgctg

SEQ ID NO: 14701 - RNA, 128 nt, Rhodopseudomonas palustris
  source 1..128: mol_type = other RNA; note = Related to CP019966.1
ttatgtacgaggtctcccatcgcatacgcgctgtagtaactgcggcgtaagagctaaagtctgtgcaaatcgtgcgcgccacatgcgcaatgcgagcatggcgtgattggaagggagacctcgtaact

SEQ ID NO: 14702 - RNA, 129 nt, Mesorhizobium sp.
  source 1..129: mol_type = other RNA; note = Related to NZ_WOAC01000030.1
tgcttcacgaggtctcccctcgcatacgcgctgtagtaactgcggcgtaagagctaatgtctgcacatatcgtgcgcgccatatcgacaatgcgacacatggcgtgattggaagggagacctcgtgccg

SEQ ID NO: 14703 - RNA, 127 nt, Notoacmeibacter sp.
  source 1..127: mol_type = other RNA; note = Related to JAIOIW010000047.1
ttcttcacgaggtttcccctcgcatacgcgctgtagtaactgcggcgttagagctaatgtctgcacatatcgtgcgcgccatgggactcggtacacttggcgtgactggaggggagacctcgtgcca

SEQ ID NO: 14704 - RNA, 128 nt, Rhizorhabdus wittichii
  source 1..128: mol_type = other RNA; note = Related to CP021181.1
gctgccacgaggtcttccctcgcatgcgcgctgtgcaactgcggcgtaagagctaatgtctaggaagatcgtgcgcgccaggaacccttgggcgaccccggcgtgattggaaggaagacctcgtgccc

SEQ ID NO: 14705 - RNA, 127 nt, Caulobacter sp.
  source 1..127: mol_type = other RNA; note = Related to QHJY01000004.1
agtcctacgaggtctcccctcgcatccgcgcggtggcaactgccgcgtaagagctcatgtctgcacatatcgtgcacgccacgtactacgggacgatcggcgtgattggaagggagacctcgtgacc

SEQ ID NO: 14706 - RNA, 132 nt, Methylobacterium oryzihabitans
  source 1..132: mol_type = other RNA; note = Related to SACP01000011.1
ctcagtacgaggtctcccccctcgcatgcgcgctgttgtaactgcggcgtaagagcggatgtctgagtagatagtgcacgccccggtcagcacgatgaccatggcgtgattggagggggagacctcgtgcca

SEQ ID NO: 14707 - RNA, 128 nt, Martelella mediterranea
  source 1..128: mol_type = other RNA; note = Related to SMAR01000071.1
atcaatgcgaggtctcccctcgcatgcgcgctgtagtaactgcggcgtaagagctaatgatctcagaatatcgtgcgcgtcacgagattatgacgccatgacgtgattggaggggaggcctcgtgccg

SEQ ID NO: 14708 - RNA, 126 nt, Segnochrobactrum spirostomi
  source 1..126: mol_type = other RNA; note = Related to NZ_VWNA01000001.1
cttggcgcgagatttccgctcgcatacgcgctgtcgtaactgcggcgcaagagctaatgtgtcgagaaaacgggggcgccgtcaatgaggacgccactgcatgactggagcggagatctcgcacca

SEQ ID NO: 14709 - RNA, 128 nt, Cereibacter sphaeroides
  source 1..128: mol_type = other RNA; note = Related to CP031750.1
tgccatacgaggtgctccctcgcactcgcgttgtcggaactgaaacgcaagacgcaatgaacagcacaagtctgtggcctgcataatctgatatcctatgcatgaatggaggggagcacctcgtgcct

SEQ ID NO: 14710 - RNA, 127 nt, Bradyrhizobium cytisi
  source 1..127: mol_type = other RNA; note = Related to VSSR01000016.1
taatagaaggagcgccccctcgcataccgcgctgtcgtaactgcggcgtctgactcaacggttggtaacatgattgacggcccgaaatgctttgcatcgggcgagaaggagggggcgccccttttac

SEQ ID NO: 14711 - RNA, 127 nt, Bradyrhizobium sp.
  source 1..127: mol_type = other RNA; note = Related to JADPJU010000115.1
ttaataatgcagcgccccctcgcataccgcgctgttgaaactgcggcgtttgaatgaatggtacgtcacttgattcgcggcccaatgctatatggcctgggcgagaaggagggggcgctcccttttt

SEQ ID NO: 14712 - RNA, 117 nt, Bradyrhizobium sp.
  source 1..117: mol_type = other RNA; note = Related to NZ_JYMS01000026.1
gcgaccgcgccccctcgcatgccgctctgtcgtaactgcggagatttgaccgaaaggttctggatatgatcgcggcccgaatgccttgggctcgggcgagaaggagggggcgcactt

SEQ ID NO: 14713 - RNA, 128 nt, unidentified
  source 1..128: mol_type = other RNA; note = Related to SDYD01000559.1; note = Alcaligenaceae bacterium
cttgcgttgaggcctcctcgcattgcgcgctgttggaactgcggcgtctgactcaatgtccggtacaaaaggcccgacgatcgcgacgaatgatcaacaccgtcggagaaggaggaggtctcaccctt

SEQ ID NO: 14714 - RNA, 125 nt, Roseomonas sp.
  source 1..125: mol_type = other RNA; note = Related to JADCGG010000223.1
atcatactaaggcgtctcctcgcatgacgcgtcgtgttaacgcgacgtttgaccgaatgttacctcaggatgtcgccgttgctttcggcggcttgccggcgatcagaaggaggagacgcctttca

SEQ ID NO: 14715 - RNA, 121 nt, Yangia pacifica
  source 1..121: mol_type = other RNA; note = Related to JAIVAG010000015.1
tgcgatacgaggccttcctcgcaaaacgtgctgtgtaatcgcggcatgagatgaaaagttcagagaaatctgcgtctcgaacatcaatttccgttcgatgattggagggggcctcgtgcca

SEQ ID NO: 14716 - RNA, 128 nt, Epibacterium ulvae
  source 1..128: mol_type = other RNA; note = Related to NZ_PHJF01000002.1
ctttgaacgagactctgcctcgcacaacgcgttgtcgtaactgcgacgtgagattaaaagttatactatatcagccaaaccatggtgatttgacacttcatggcgaaaggaggcggtgtctcgtgcca

SEQ ID NO: 14717 - RNA, 144 nt, Dickeya sp.
  source 1..144: mol_type = other RNA; note = Related to SZVX01000028.1
atacggctctgccttaaatctgtgaggttgtttcgcctcgaggtatctaatgttagcatatcatgccatcgttcatcgaatggttattcgttgtaaaagtttgtcagctatacgttgcgtaaagtgattgggcagggtcgtaat

SEQ ID NO: 14718 - RNA, 145 nt, Klebsiella quasipneumoniae
  source 1..145: mol_type = other RNA; note = Related to CP055010.1
gcacggctctgccttaaatctgtgaggttgtttcgcctcgaagtatctaatgtcagtacatcatgccaccgttcagccgaatggttactggtcgcaacaggttgttggctttacgttgcgcaaagtgattggacagagccgtaaa

SEQ ID NO: 14719 - RNA, 144 nt, Enterobacter sp.
  source 1..144: mol_type = other RNA; note = Related to CP012871.1
atacggctctgccttaaatctgtgaggttgtttcgcctcgaagtatcttatgttagtacatcacgctaccaatcagcggttagttacttgacgtaactgttaattggctaaagtttgcataaagtgattgggcggagccgtaaa

SEQ ID NO: 14720 - RNA, 147 nt, Edwardsiella tarda
  source 1..147: mol_type = other RNA; note = Related to PDDV01000006.1
taatgcggcttcgtcttaaattttctaggttgtttcgccttgagagatttaatgtgagcacatcacgccccaatcagcggtcgttacagattgccagttggatagctctatacagatgcgaaaagtgattggacgaagccgcacatt

SEQ ID NO: 14721 - RNA, 146 nt, Citrobacter koseri
  source 1..146: mol_type = other RNA; note = Related to LR134204.1
ttacggctctgccttaaatctgcgaggtcgtttcgcctcgaattatctaacgtaagcaagatcacgcatccgccactctggatgaccgcttgtcgcactctctggattacctccggttgcgcaaggtgattgggcagagccgtaac

SEQ ID NO: 14722 - RNA, 143 nt, Escherichia coli
  source 1..143: mol_type = other RNA; note = Related to CP057087.1
ctacggctctgccttaaatttgtgaggttgtttcgcctcgaaggaactaatgttaggacatacgccaccgttcagtcgatggtaacgcttcttaactagtggtccgctaagtgatgcgcaaagtgattgggcagagccgaaac

SEQ ID NO: 14723 - RNA, 143 nt, Klebsiella variicola
  source 1..143: mol_type = other RNA; note = Related to NZ_CAKLOR010000001.1
atacggctctgccttaaatttgtgaggttgtttcgcctcgaaggaactaatgttagcacacatgccatcgttcaggcgatggttactggtcgtaacttgatgtcagctatacgttgcgtaaagtgattgggcagagccgaaac

SEQ ID NO: 14724 - RNA, 145 nt, Proteus mirabilis
  source 1..145: mol_type = other RNA; note = Related to CP063440.1
atacggctccaccttaaatttgtgaggttgtttcgcctcgaaggaactaatgttaagatatatgccgttattctgctgtaaattgttatccatataacggtttttcagctatagattgcgtaaagtgattgggtggagccgtaat

SEQ ID NO: 14725 - RNA, 143 nt, Erwinia persicina
  source 1..143: mol_type = other RNA; note = Related to CP082141.1
atacggctctgccttaaatttgtgaggttgtttcgcctcgaaggaactaatgttaggacacatgccaccgttcatccgatggttattgttcgcaacgggttgtcagctatacgttgcgcaaagtgattgggcagagccgtatt

SEQ ID NO: 14726 - RNA, 146 nt, Serratia plymuthica
  source 1..146: mol_type = other RNA; note = Related to CP065673.1
gtacggctctgccttaaattttcaaagttgtttcgctttgaagtagtaaatgtgtggacatcatgcccctgtcagctgtgccgcgaaatgggctacaccagattggcgcgttggttttgcgtaaagtgattgggcagagccgatca

SEQ ID NO: 14727 - RNA, 145 nt, Serratia rubidaea
  source 1..145: mol_type = other RNA; note = Related to CP065717.1
gtacggctctgccttaaattttcaaagttgtttcgctttgaagtagtaaacgagtggatatcatgccttatcagcgtcatgctaaatgggttacgccaggtagtatcgccgggttttgcgtagagtgattgggcagagccgtttg

SEQ ID NO: 14728 - RNA, 140 nt, Xenorhabdus bovienii
  source 1..140: mol_type = other RNA; note = Related to HG427573.1
tactggctctgccttaaattttcaaagttgtttcgctttgaagtaaataatgtgaggttatcatgcctactgaacatggtggttacaccatgggttaacacgaaatttgtgtgcatagagtgattgggcagagccgcttt

SEQ ID NO: 14729 - RNA, 154 nt, Serratia fonticola
  source 1..154: mol_type = other RNA; note = Related to QRAU01000016.1
agatggctccaccttaaattttcaaagttgtttcgctttgattttagcaaggttagtagaaatgccctgctccagggttgctgattgtccgcaaagttgcttcgtgagcttagcgtccttaggattgcgtaaggtgattgggtggagccactat

SEQ ID NO: 14730 - RNA, 154 nt, Yersinia mollaretii
  source 1..154: mol_type = other RNA; note = Related to NZ_CABHYS010000030.1
aaaaggctccaccttaaattttcaaagttgtttcgctttgatttcaataacgtgagtagatatgccctgttaagggttgctgattgcccgctaagttgcttaataatcttagcgagcttatagtttgcgtaaggtgattgggtggagccaccct

SEQ ID NO: 14731 - RNA, 148 nt, Pseudoalteromonas sp.
  source 1..148: mol_type = other RNA; note = Related to LKDX01000002.1
ctcggtttcgacccaaaatgtctgaagttgtaactgctttggatttggaacacaggctagcaaatgctgccggctatactcttatggctatctttatcgaattgctcgatgtcttaattggcgcaaggtgattgggtcgaaaccacta

SEQ ID NO: 14732 - RNA, 144 nt, Agarivorans litoreus
  source 1..144: mol_type = other RNA; note = Related to NZ_BLPI01000001.1
cttggtttcaacccaaaatgtctgaagttgttactgcttcggacttggaactccgggtaacatatgctcggctacaactgtatctgatgttatcgatttgctcgatggctcaaatggcgcaaggtgattgggttgaaaccattt

SEQ ID NO: 14733 - RNA, 148 nt, Aeromonas salmonicida
  source 1..148: mol_type = other RNA; note = Related to NZ_CP051883.1
tacggtttcagccctaaatgtctgaagttgttactgctttggacttggaataccgggtaacacatgcccacggttcatctttatcggattgcctcgattcattcgattcgccgcgtggtggcgtaaggtgattgggctgaaaccactt

SEQ ID NO: 14734 - RNA, 144 nt, Pseudoalteromonas agarivorans
  source 1..144: mol_type = other RNA; note = Related to NZ_CP033065.1
actggtttcgacccaaaatgtctgaagttgttaccgctttagattaggaactctgggtaggatatgcctgtgtgaactttatcagattgcttccaattatctgattggctctaagtgcgcaaagtgattgggttgaagccgtta

SEQ ID NO: 14735 - RNA, 151 nt, Vibrio crassostreae
  source 1..151: mol_type = other RNA; note = Related to VFNK01000001.1
tgtggtttcaacccaaaatgtctgaagttgttactgctttggacttgtaactcagggtaactcatgcccgatgatctcgactttaccggatgcacatgatgtatacgggttgcctttaaggtggcgcaaggtgattgggttgaaaccatta

SEQ ID NO: 14736 - RNA, 147 nt, Pseudoalteromonas galatheae
  source 1..147: mol_type = other RNA; note = Related to NZ_PNCO02000001.1
gttggcttcaacccaaaatgtctgaagttgttactgctttggacttggaaatcagggtagcatacgctcgatgtaagaggggcgctttactccaataatattggatgtgtcgcaagcctgcgcaaagtgattgggttgaagccacta

SEQ ID NO: 14737 - RNA, 147 nt, Pseudoalteromonas piscicida
  source 1..147: mol_type = other RNA; note = Related to NZ_JXXX01000040.1
attggcttcaacccaaaatgtctgaagttgttactgctttggacttggaaatctgggtagcatacgctcgatgtaagaggggcgctttactccaataatattggatgtgttgcaagcctgcgcaaagtgattgggttgaagccacta

SEQ ID NO: 14738 - RNA, 141 nt, Vibrio parahaemolyticus
  source 1..141: mol_type = other RNA; note = Related to CP040101.1
aatggcttcggcccaaactgtctaaagttgttactgctttggactagggactctgagttccatatgccatcctgacgattggatgatatctctatgctgcatgtagcggaaaggcgcaaggtgattgggctgaagccaagc

SEQ ID NO: 14739 - RNA, 156 nt, Neiella sp.
  source 1..156: mol_type = other RNA; note = Related to JACXAF010000008.1
atgggtttcaacccaaaatgtctgaagttgttactgctttggactaggaattccgagaacattatgctcattaaatctgcataagcccaagggggctgtcgtgattgatgggttgcttgccgcaaggtgcgcagggtgattgggttgaaactcgcc

SEQ ID NO: 14740 - RNA, 147 nt, Aeromonas veronii
  source 1..147: mol_type = other RNA; note = Related to NZ_LKJS01000005.1
tttgggctcaaccctaaatgtctgaggttgttactgctttggactaagatatgcgagtacattatgcctgctgaggcgtgctcaccgggtgagcgccaatttgcactggtcgctcaggtgcgtaaggtgattgggttgagcccactc

SEQ ID NO: 14741 - RNA, 134 nt, Rhizobium mongolense
  source 1..134: mol_type = other RNA; note = Related to NZ_VISO01000003.1
cgaggcttgaccctctagttggtgccggtgaattcacggcaactcgctgaaacgtcagtacacatccgcgcgggccggtgcgctatgctcgatgcggtgacacgggaaggtacagagcgagggtcaagccttga

SEQ ID NO: 14742 - RNA, 130 nt, Rhizobium sophorae
  source 1..130: mol_type = other RNA; note = Related to NZ_JABFCN010000062.1
aggcttggccctctaatttgtgccggtgaattcacggcaactcgctgagacgtcagtacacaaccgcgcgggccgggcgattgctcaaacggtgcaccacgggaatggtaaagagcgagggccaagcctt

SEQ ID NO: 14743 - RNA, 133 nt, Rhizobium laguerreae
  source 1..133: mol_type = other RNA; note = Related to JAAXST010000004.1
tgaggcttgaccctctagtttgtgccggtgaattcacggcaactcgctgaaacgtcagtacacaatcgcgcgccggctctgcggcaacacacgcggttccacggaaaggtaaagagcgagggtcaagccttga

SEQ ID NO: 14744 - RNA, 127 nt, Chelatococcus asaccharovorans
  source 1..127: mol_type = other RNA; note = Related to JAHBRY010000004.1
agacttggccctctagttggagccggtgtatccacggctgctcgacgaaaagttagtccataaggcgtgcgcggcggtccgtcgacgcgtactacctgcatcaggtaaggagcgagggccaagtctt

SEQ ID NO: 14745 - RNA, 131 nt, unidentified
  source 1..131: mol_type = other RNA; note = Related to JAGRAU010000490.1; note = Bdellovibrionales bacterium
agacttagccctctagttggagccggtgaattcacggctactggtaggaatgttactccataccgcgccgcgtgccgtggtgcgacaacgggtgatccacgttgagaagtaaagagcgagggctaagtctt

SEQ ID NO: 14746 - RNA, 128 nt, Hoeflea sp.
  source 1..128: mol_type = other RNA; note = Related to NZ_KB890024.1
aggcttggccctctagttggagccgttgaatccacggctactcgctgaaatgtcatttcacaacgtcgtgccggccgggctgaccggaccgtgacccgttgaaaggtaaagagcgagggccaagcctt

SEQ ID NO: 14747 - RNA, 133 nt, Shinella sp.
  source 1..133: mol_type = other RNA; note = Related to NZ_MYFQ01000014.1
agaagcttgaccctctaattggtaccggtgaatccacggtagctcgctataatgtcagtacacattcccgcgcgccggccgaataagccgtgcgatcggcgatgaaaggtaaagatcgagggtcaagcatttt

SEQ ID NO: 14748 - RNA, 131 nt, Rhizobium sp.
  source 1..131: mol_type = other RNA; note = Related to NZ_CAKKMZ010000001.1
gtagcttgaccctctaattggtgccggtgaatccacggcaactcgctataacgtctgtacacatgcgcgcgggccggcgtgaccaaacaccggcaagcccaacgaaggtaaagatcgagggtcaagctttc

SEQ ID NO: 14749 - RNA, 134 nt, Marinibacterium profundimaris
  source 1..134: mol_type = other RNA; note = Related to NZ_AQQR01000002.1
gaaggtccggctctctaatttccgctggtgaatccccggtggctcgctgaaacgttggtccaaaatcgcgacggtccgacggataatcgttccttagacgctgatgaaggtagagaacgagggttgggccttcc

SEQ ID NO: 14750 - RNA, 133 nt, Phaeobacter inhibens
  source 1..133: mol_type = other RNA; note = Related to CP010623.1
caaggctcaactctctagtttgcgctggtgaatccccggcggctcgctgaaacgttagtcctaaatcgcggcggcgcggtgggttgtccactgtgtatcgtcgataaggtagagaacgagggttgagccttcc

SEQ ID NO: 14751 - RNA, 134 nt, Pseudohoeflea suaedae
  source 1..134: mol_type = other RNA; note = Related to SMSI01000004.1
cgacgcttgctcctctacttggtgccgttgaatccacggcatatggctgaacgttcagtacacaaccgcgcgcgccggcgttatggccaaccggggtgctcgaatcgaggtaaagaacgaggagcaagctttgc

SEQ ID NO: 14752 - RNA, 126 nt, Shimia sp.
  source 1..126: mol_type = other RNA; note = Related to JAGHRO010000004.1
gtgctcgaccctctacttggggctgtagaatccacggctgcttattgtaaagtcagtacacagttggttgactcctgtgcaatgtgagagtcaccgatgaaaagtaaagagcgagggtcgagccaa

SEQ ID NO: 14753 - RNA, 132 nt, Paenirhodobacter enshiensis
  source 1..132: mol_type = other RNA; note = Related to NZ_JFZB01000068.1
gcagctcgaccctctacttggggctgttgaatccacggctgcttattagaatgtcagtacacaatcgcgcggcgcggtccgtgcgacatgtgtgatacccgatgcaaggtaaagagcgagggtcgagctgat

SEQ ID NO: 14754 - RNA, 133 nt, Roseivivax halotolerans
  source 1..133: mol_type = other RNA; note = Related to FOXV01000005.1
ttagctcggccctctacttggggctgtagaatccacggctgcttattgaaatgtctatacataatcgcgcggccggtcggtgtgattcagccggatgcgtgtggataaggtaaagagcgagggtcgagctgat

SEQ ID NO: 14755 - RNA, 150 nt, Halomonas sp.
  source 1..150: mol_type = other RNA; note = Related to JAINWD010000002.1
acaagcacccctcaagctttaactatgcagtgcaaccactgcaatcatccttaatgtaaggacatatgctactatggattacgttgagactgtaatacgcaatattacgaggtctcgcgaggcgtaaggtaaatagcaggggtgcttttt

SEQ ID NO: 14756 - RNA, 152 nt, Pseudomonas aeruginosa
  source 1..152: mol_type = other RNA; note = Related to NZ_QBEO01000006.1
cgcagcacccctccaagctttaactatgcagtgctaccactgcaatcatcgttaatgtaaggatatatgcgactgtggatttcgatgggactaatgattcgcaatgttatgagtctcgcgaggcgtaaggtaaatagcggggggtgctgctt

SEQ ID NO: 14757 - RNA, 152 nt, Pseudomonas sp.
  source 1..152: mol_type = other RNA; note = Related to NZ_NEIO01000001.1
gcatgcacccctccaagctttaactatgcagtgcgaccactgcaatcattcgttaatgtaaggatatatgctactgtgagttacgttgagactatagttcgcaatgttatgagtctcgcgaggcgtaaggtaaatggcggggggtgctgctt

SEQ ID NO: 14758 - RNA, 152 nt, Pseudomonas parafulva
  source 1..152: mol_type = other RNA; note = Related to NZ_CP009747.1
caaagcacccctccacgctttaactatgcagtgcgaccactgcaatcatcgttaatgttaggacatatgctactgtgagtgacgttgagactaatgattcggaatgttacgagtctcgcgaggcgtaaggtaaatggcggggggtgctactt

SEQ ID NO: 14759 - RNA, 151 nt, Pseudomonas lundensis
  source 1..151: mol_type = other RNA; note = Related to NZ_CP075180.1
gagggcacccctccaagctttaactatgcagtgctaccactgcaatgatcgttaatgtaaggacatatgctactgtgagttacgctgagactatcgattcgcaatgttatgagtctcgcggggcgtaaggtaaatagcgggggtgccgctt

SEQ ID NO: 14760 - RNA, 149 nt, Pseudomonas sp.
  source 1..149: mol_type = other RNA; note = Related to NZ_JYKS01000054.1
acaggcacccctccaagctttaactatgcagtgctaccgctgcaatgatcgttaatgtaaggacatatgctactgagagttacgtcgaggcttcttcgcaatgttagcggtctcgcggggcgtaaggtgaatagcggggggtgccgctt

SEQ ID NO: 14761 - RNA, 150 nt, Pseudomonas sp.
  source 1..150: mol_type = other RNA; note = Related to RHQN01000003.1
ctaggcacccccaacagctttaactatgcagtgtgaccactgcaatgatctttgatgtatgcacaaatgccactcgggttacgccatgacccttggaggttacgttacggttcgtgatgggcgtaaggtaaatagcggggggtgccgctt

SEQ ID NO: 14762 - RNA, 155 nt, Pseudomonas mendocina
  source 1..155: mol_type = other RNA; note = Related to CP013124.1
aagggctccccccacagctttaactatgcagtgctacctactgcaaaaatctgtcaagttcccacatacgccaccttagcggactcgcgacgttggcggcctattgatcgttacggttgactagggcgtaaggtaaaaggcagggggagcccttt

SEQ ID NO: 14763 - RNA, 154 nt, unidentified
  source 1..154: mol_type = other RNA; note = Related to JAAYGA010000118.1; note = Pseudomonadaceae bacterium
gggctcctgtccaaaagctttaactatgcagtgctacctactgcaaaaatctgttatgttttcccatatgctactttcgcgacttagcaagttggcgacctatcaatcattacggttgactcaggcgtaaggtaaaaggcgggagaggagccct

SEQ ID NO: 14764 - RNA, 155 nt, Pseudomonas rhizoryzae
  source 1..155: mol_type = other RNA; note = Related to NZ_SULN01000012.1
ggggctcctccctacagctttaactatgcagtgctacctactgcaaaaatctttcatgtacacccatacgctgcactcgcggtatcgctatgcggcggcctttcgattgtagtggtcgacaagggcgtaaggtaaaaggcaagggaggagcccct

SEQ ID NO: 14765 - RNA, 117 nt, unidentified
  source 1..117: mol_type = other RNA; note = Related to JADMJM010000027.1; note = Hyphomonadaceae bacterium
aagcatcccgtccttctacgtccgctgttgatcctgcggcggaacagacaatgctcctctttaaggcccctgcacgagtgcaggggccttcgtaaggtacgagggacgggatgcctt

SEQ ID NO: 14766 - RNA, 117 nt, unidentified
  source 1..117: mol_type = other RNA; note = Related to JAEUMP010000020.1; note = Hyphomonadaceae bacterium
aagcatcccgtccttctacgtccgctgtcgatcctgcggcggaacagacaatgctccactttaaggcccctgcacgggtgcaggggccttcgtaaggtacgagggacgggatgcctt

SEQ ID NO: 14767 - RNA, 119 nt, unidentified
  source 1..119: mol_type = other RNA; note = Related to WGOB01000084.1; note = Alphaproteobacteria bacterium
aggcatccggtccttctacgtccgctgtcgatcctgcggcggaacaacaaatgtcgatctttaggagtacggggctgaagccccgtactcctagtaaggtacgagggacgggatgcctc

SEQ ID NO: 14768 - RNA, 118 nt, unidentified
  source 1..118: mol_type = other RNA; note = Related to JAEUMQ010000020.1; note = Hyphomonadaceae bacterium
gcgcatcccgtccttctacggccgctgtcgatcctgcggcggaacaaacaatgtctgtctttgacacacccgtcacaaggacgggtgtgcccgtaaagtacgagggacgggatgcagc

SEQ ID NO: 14769 - RNA, 121 nt, unidentified
  source 1..121: mol_type = other RNA; note = Related to WGNI01000003.1; note = Alphaproteobacteria bacterium
aggcatcccgcccttctacgtccgttgtcgatcctgcgacggaacaaacaatgtcggtctttagactacccgtgcgcaagcgcacgggtagtctggtaaggtacgagggacgggatgccgg

SEQ ID NO: 14770 - RNA, 114 nt, unidentified
  source 1..114: mol_type = other RNA; note = Related to JAEUMS010000023.1; note = Hyphomonadaceae bacterium
aagcatcctgtccttctacgtccgctgttgatcctgcggcggaataaataaggtgcgtctttaaacccagcgctaaagcgcgggtttggtaaggtacgagggacgggatgcctt

SEQ ID NO: 14771 - RNA, 114 nt, unidentified
  source 1..114: mol_type = other RNA; note = Related to DPWD01000203.1; note = Hyphomonadaceae bacterium
aagcatcccgtccttctaagtccgctgttgatcctgcggcggaataaataaggtgcgtctttaaacccagcgcttaagcgcgggtttggtaaggtacgagggacgggatgcctt

SEQ ID NO: 14772 - RNA, 113 nt, Vitreimonas flagellata
  source 1..113: mol_type = other RNA; note = Related to NZ_SBJL01000001.1
aggcatctcgtccttctacgtctgctgttgatcctgcggcagaacaaacaacgtctgtctttatacccagccctgcgggcgggtatcgtaaggtacgagggacgggatgcctc

SEQ ID NO: 14773 - RNA, 118 nt, unidentified
  source 1..118: mol_type = other RNA; note = Related to JAGWZE010000002.1; note = Alphaproteobacteria bacterium
gagcatcccgcccgtctaagtccgctgtcgatcctgcggcggaaagtcaaacgcccatcttcaaggccatgggccaaggcccatggccttgcctaaggtacgaggggcgggatgctct

SEQ ID NO: 14774 - RNA, 122 nt, unidentified
  source 1..122: mol_type = other RNA; note = Related to JAHQVS010000037.1; note = Rhodobacteraceae bacterium
gcagccccgctcctctatgttcgctgttgatcctgcggcgtaagtagaattgcacacttttactagggggaccgcgtgaacgcggtccccctagtaattaaggtacgaggagtggggcatct

SEQ ID NO: 14775 - RNA, 118 nt, unidentified
  source 1..118: mol_type = other RNA; note = Related to JAHJSN010000196.1; note = Alphaproteobacteria bacterium
aggcatcctgcccttctacgtctgctgttgatcctgcggcagaaaaatcaaagtcttcttttaactatgggccgtaaacggcccatagttacataaggtacgaggggcaggatgcctg

SEQ ID NO: 14776 - RNA, 125 nt, unidentified
  source 1..125: mol_type = other RNA; note = Related to JAGWZH010000139.1; note = Alphaproteobacteria bacterium
gcgcgccgcccttctacgtccgctgttgttcctgcggcggaataaacaatgtctcactttacccaagggccgggcccgctcgcggccccggccctagggccccaaggtacgaggggcggcgtgtt

SEQ ID NO: 14777 - RNA, 184 nt, unidentified
  source 1..184: mol_type = other RNA; note = Related to JAGQQN010000044.1; note = Planctomycetaceae bacterium
aaacgacttccacttacctgtttgggctgttgatcctgcagcttgatcgtaaatgtatctttagtacgtcaactcagactctgcttgttcctaagtgtctctaaggcatcctgcggaaggcacctaatggtgctgtagtctttcagaagctgagatgttcggtaagagaaagtgggagcgtttc

SEQ ID NO: 14778 - RNA, 140 nt, Alteromonas confluentis
  source 1..140: mol_type = other RNA; note = Related to MDHN01000015.1
ggagattgggtgcccatgatttacctttcttatgctatctgcgtaagtattaaaacaacggcatttttgccgctcatcgattactcttaaaggccattcgcccggcagaggtaaagataaaatcgggcacccaatcttat

SEQ ID NO: 14779 - RNA, 139 nt, Idiomarina fontislapidosi
  source 1..139: mol_type = other RNA; note = Related to QJST01000027.1
atttgcgggtgaacagaatttactttccttatgcttatcagcataagagttaaataacggcatttttgccgtttatctgattactctaagtgttaagttgtcttatagaggtaaagagaaaatagttcacccgcagttt

SEQ ID NO: 14780 - RNA, 129 nt, Vibrio renipiscarius
  source 1..129: mol_type = other RNA; note = Related to JTKH01000003.1
gcaagaggcgagagtttaactttctgctgttaatctgcggcggtcataagcatgtttctttttaccggtcctcagctagcctgatgatgccgttacgctgtacaagagaaaacaaaatcgcctcgttct

SEQ ID NO: 14781 - RNA, 128 nt, Photobacterium sp.
  source 1..128: mol_type = other RNA; note = Related to NZ_LSNH01000001.1
caaagaggcgagagtttaactttctgctgttaatctgcggcggtcataagcatgtttctttttccggttgtcatctaaaatgttgcagccgttacgctgtataagagaaaacaaaatcgcctcgtttt

SEQ ID NO: 14782 - RNA, 131 nt, Vibrio parahaemolyticus
  source 1..131: mol_type = other RNA; note = Related to ABBBER010000002.1
cgaagaggcgaaaggtttaactttctgctgtctatctgcggtggtcatgaaaatgtttctttttccccgtgtatgtcacacttgtggcgtcatggtactcgatataagagaaaacaaaatcgcctcttcac

SEQ ID NO: 14783 - RNA, 137 nt, Yersinia proxima
  source 1..137: mol_type = other RNA; note = Related to NZ_CABHZI010000111.1
cagcgcattttatcacaatttaactttctactgactatctgcggtagccataaacatgtaacttctgcatcggccgactttccgtatctcgcatgtttgccgaatttgcaaaagagaaaatagataaagtgcgctgt

SEQ ID NO: 14784 - RNA, 134 nt, Pseudomonas taeanensis
  source 1..134: mol_type = other RNA; note = Related to NZ_AWSQ01000001.1
tcgggttcggggcacaatttaactttccactgactatatgcggtggccactgtaagggtagctttgcctgatcgtgctatacggttacgttatcgatggcgacggtaaaagagaaaatagccccgaaacccggt

SEQ ID NO: 14785 - RNA, 134 nt, Pseudomonas amygdali
  source 1..134: mol_type = other RNA; note = Related to CP026558.1
ccgggttcggggcacaatttaactttccactgactatatgcggtggccactgcaagggtagctttgcctgatcgcgctatacggttacgttatcgatggcgacggtataagagaaaatagccccgaaacccggt

SEQ ID NO: 14786 - RNA, 136 nt, Pseudomonas fluorescens
  source 1..136: mol_type = other RNA; note = Related to CABVIC010000001.1
tcgggctcggggcaaaaatttaactttccactgactatatgcggtggccaatgcaagggttgctttgccttatcgctcttaacgatattgttaacgttggcgatgtgtagaagagaaaatagccccgaagctcggt

SEQ ID NO: 14787 - RNA, 135 nt, Pseudomonas chlororaphis
  source 1..135: mol_type = other RNA; note = Related to NZ_CP054866.1
ccgggctcggggtacgatttaactttccactgactatatgcggtggccaatgcaagggtagctttgcctattcgcgcttaacgatgttgttaacgttggcgatgtgtaaaagagaaaatgaccccgagacccggt

SEQ ID NO: 14788 - RNA, 135 nt, Pseudomonas protegens
  source 1..135: mol_type = other RNA; note = Related to MOAT01000002.1
ccggggtcggggcacgatttaactttccactgactatatgcggtggccagcgcaaggctagctttgcccgttacgcacttacgatgtcgacgaggttgccgatgtgtaaaagagaaaacagccccgacgcccggt

SEQ ID NO: 14789 - RNA, 137 nt, Pseudomonas seleniipraecipitans
  source 1..137: mol_type = other RNA; note = Related to NZ_FNBM01000007.1
ccgggggcagggcccaatttaactttctgctgactatatgcggcggctaatgtaaggggggctttgcccgttacgttctcacagtgggttacgaattggcaatgtgggtaaaagagaaaattgccctgactcccggt

SEQ ID NO: 14790 - RNA, 136 nt, Pseudomonas stutzeri
  source 1..136: mol_type = other RNA; note = Related to AJXE01000010.1
tcgggtgtaggggcacaatttaactttccactgactatatgcggtggccaagtaaagggttgctttgccgttacgcgctgacggtttctcacggttggcgacgtatgtaaaagagaaaatagtccctacactcggt

SEQ ID NO: 14791 - RNA, 136 nt, Pseudomonas dryadis
  source 1..136: mol_type = other RNA; note = Related to NZ_QJUN01000007.1
ccgggtgtagggacgcaatttaactttccactgactatatgcggtggccagataaagggttgctttgccgttacgcgctaacgattactcatggttggcgacgtgtgtaaaagagaaaatagtccctgcactcggt

SEQ ID NO: 14792 - RNA, 137 nt, Pseudomonas fluorescens
  source 1..137: mol_type = other RNA; note = Related to NZ_CP075566.1
tcgggtgtagaggcacaatttaactttccactgactatatgcggtggccacatgaagggttcctttgccgttacgcgctgacgattactatgaggttggcgacgtgtgtaaaagagaaaatagcctctgcacccggt

SEQ ID NO: 14793 - RNA, 134 nt, Pseudomonas syringae
  source 1..134: mol_type = other RNA; note = Related to NZ_KE695189.1
tccggatgtgggggagatttaactttctgctgttaatctgcggtggcttcgtaaaagtgtcttttgctctttcggcttttcagaggtttgaatggtctcgatggatataagagaaaacaccccacattccggac

SEQ ID NO: 14794 - RNA, 135 nt, Pseudomonas viridiflava
  source 1..135: mol_type = other RNA; note = Related to NZ_UUIZ01000014.1
gcccgatgtggagggcgatttaacttactgctgactctctgcggcggacatcggaaggcttcttttgcccatcgatatttgttaacaatatgatctcgttacgttgtacaagagaaaacacctccacatcgggca

SEQ ID NO: 14795 - RNA, 138 nt, Pseudomonas corrugata
  source 1..138: mol_type = other RNA; note = Related to JAEIKZ010000029.1
cccgacggtggggggcgatttaactttccgctgactgtctgcagtgggtaactcaacggttgcattctgcttgtttgagctcaatgttctggatgttgtcgctcagtgatacaagagaaaacatccccaccgtctggc

SEQ ID NO: 14796 - RNA, 135 nt, Marinobacterium mangrovicola
  source 1..135: mol_type = other RNA; note = Related to SMFU01000008.1
cgagcgaggggctctgatttaactttccgctgactatctgcggcggtaattattacgtttcttttgcagctcggcctcctgggatgcgctgacgatgtgctgcagtgtataagagaaaattagccccttgttcgt

SEQ ID NO: 14797 - RNA, 129 nt, Micavibrio sp.
  source 1..129: mol_type = other RNA; note = Related to DUBU01000004.1
cagcatatgagggcagagtttaactttccattgttaatctgcaatgtgtcaaaacaatgtttcttctggccgcacaacgcgtgtgtaagccgtaccgctgtacaagagaaaacagccctcgtatgcatt

SEQ ID NO: 14798 - RNA, 127 nt, Legionella pneumophila
  source 1..127: mol_type = other RNA; note = Related to CP016868.1
cgtggcggtatgaattaaatttccattgtctatctgcgatggttataagtatgttatctattacgctcagtattattactaaactgttattgcagctaagggtataagaaaaattctaccgccaatt

SEQ ID NO: 14799 - RNA, 126 nt, Acinetobacter sp.
  source 1..126: mol_type = other RNA; note = Related to NZ_NHRP01000030.1
aagtctatcacttttaattaatttctattgtgtattcgcaatggtcaatttcaatgtcagtaacatcttcgagacttcatcgacgacagtgatttcgtcgtagaaaaattttaagtgatagatttt

SEQ ID NO: 14800 - RNA, 134 nt, Pseudomonas brassicacearum
  source 1..134: mol_type = other RNA; note = Related to NZ_MOBC01000433.1
cttagcctccattcaggtattaaatagggttgttcaaatgcgacccgattcaaaaacgccacaagcaacggcgctgagctactcggagacgttatgcttaaaggaatatggtgaaatatgaatggaggcttttt

SEQ ID NO: 14801 - RNA, 134 nt, Pseudomonas sp.
  source 1..134: mol_type = other RNA; note = Related to NZ_LJRZ01000537.1
cctggcctccattcaggtattaaatagggttgttcaaatgcgacccgattcaaaaaagccacaagcaacggcactgagcaactctgcgacgttatgcttaaaggaatatggtgaaatatgaatggaggcttctt

SEQ ID NO: 14802 - RNA, 134 nt, Pseudomonas sp.
  source 1..134: mol_type = other RNA; note = Related to NZ_BCBD01000043.1
ctttgcctccattcaggtattaaatagggttgttcaaatgcgacccgattcaaaaaagccacaagcaacggcactcagcgactctgagacgttacgctcaaaggaatagggtgaaatatgaatggaggcttttt

SEQ ID NO: 14803 - RNA, 134 nt, Pseudomonas simiae
  source 1..134: mol_type = other RNA; note = Related to PVUL01000002.1
cccagcctccattcaggtattaaatagggttgttcaaatgcgacccgattcaaaaaagccacaagcaacggcgatgagcgactctgagacgttatgcttaaaggaatagggtgaaatatgaatggaggcttctt

SEQ ID NO: 14804 - RNA, 134 nt, Pseudomonas sp.
  source 1..134: mol_type = other RNA; note = Related to NZ_LMGK01000001.1
cccagcctccattcaggtattaaatagggttgttcaaatgcgacccgattcaaaaaagctacaagcaacggcccttagcgacttcgggacgttatcttcaaaggaatagggtgaaatatgaatggaggcttttt

SEQ ID NO: 14805 - RNA, 133 nt, Pseudomonas fluorescens
  source 1..133: mol_type = other RNA; note = Related to SMCJ01000008.1
ctcggcctccattcgggtattaaatagggttgttcaaatgcgacccggctcaaaaatgctacaagcaacatccctttgcgactctggggaattatctttaaacgataaggtgaaatatgaatggaggtttttt

SEQ ID NO: 14806 - RNA, 134 nt, Pseudomonas otitidis
  source 1..134: mol_type = other RNA; note = Related to NZ_BQIA01000029.1
aaaagcctccattcagatattaaatagggttgttcaaacgcgacccaactcaaaaatgccacaagcaacagctagcagaaatcatcctagcgattaccctaaatgagtaaggtgaaatagaatggaggcttttt

SEQ ID NO: 14807 - RNA, 134 nt, Pseudomonas sp.
  source 1..134: mol_type = other RNA; note = Related to NZ_NEIR01000012.1
tgttgcctccatccaggtattaaattgggttgttcaaacgcgaccctcctcgaaaatgctgtaagcaagatcgcgatgatgaactctgaacgatactctgaatgaatagggtgaaatatggatggaggcacttt

SEQ ID NO: 14808 - RNA, 133 nt, Pseudomonas oryzicola
  source 1..133: mol_type = other RNA; note = Related to NZ_JABWRZ020000002.1
tctcgcctccatccaggtattaaattgggttgttcaaacgcgaccctacacgaaaacgctatacgcaacatcgcgatgataactctggacgatactctgaacgaatagggtgaaatatggatgggggcatcct

SEQ ID NO: 14809 - RNA, 133 nt, Pseudomonas savastanoi
  source 1..133: mol_type = other RNA; note = Related to JAAFOZ010000019.1
acgtgccccatccaggtattaaattgggttgttcaaacgcgaccctacacgaaaatgctataagcaacatcgcgccggataactctggacgatactctgaaggaatagggtgaaatatgggtggggtcttttt

SEQ ID NO: 14810 - RNA, 136 nt, Pseudomonas sp.
  source 1..136: mol_type = other RNA; note = Related to NZ_CP081943.1
caacgcctccattcaagtattaaatcgggttgttcaaatgcgacccagctcagaaacgctataagcaacatcgcgatgtgaatcactcatgatgttatcttaaaggaataaggtgaaatatgaatggaggtttttt

SEQ ID NO: 14811 - RNA, 140 nt, Pseudomonas sp.
  source 1..140: mol_type = other RNA; note = Related to NZ_QYYB01000004.1
tagcgtccccgtccagggattaacatgggttgttcaaatgcgacctggctcaataatgtgacatgcaaaagcggtgggtcgacgagtgttattcggcggtccgcgatgatgtaaggtgaaactatggacggggacatctc

SEQ ID NO: 14812 - RNA, 145 nt, Pseudomonas syringae
  source 1..145: mol_type = other RNA; note = Related to NZ_LGLH01000057.1
acacgcccccgtccgggattaaacttggttgatttaaatgcgaccataaggaacaatgctacaagcaactgctcagctatctgcaaatggttagctggatggataactcgtgaggaatagggtgaaatatggacgagggctcttt

SEQ ID NO: 14813 - RNA, 145 nt, Pseudomonas viridiflava
  source 1..145: mol_type = other RNA; note = Related to NZ_UWFG01000172.1
gattgccctcgtccgggattaaacttggttgatttaaatgcgaccataaggaacaatgctacaagcaactgctcagcgttctgctaatggtccgctgaatggataactcgaagtgaatagggtgaaatatggacgagggctcttc

SEQ ID NO: 14814 - RNA, 145 nt, Pseudomonas synxantha
  source 1..145: mol_type = other RNA; note = Related to NZ_CM001514.1
cattgccctcgtccgggattaaacttggttgatttaaatgcgaccataaggaacaatgctacaagcaactgctcagcgttctgctaatggtccgctgaatggataactcgaagtgaatagggtgaaatatggacgagggctcttc

SEQ ID NO: 14815 - RNA, 147 nt, Pseudomonas sp.
  source 1..147: mol_type = other RNA; note = Related to NZ_RWIM01000011.1
tgttgtccccgtccagggattaaaattggttgttttaaatgcgaccgtaaggaacaatgttacaagcaactgcctcagcgttacgctacattgacgccaagtggttaactgtaagtgaatagggtgaaatatggacgggggcatttc

SEQ ID NO: 14816 - RNA, 136 nt, Pseudomonas syringae
  source 1..136: mol_type = other RNA; note = Related to RBNR01000201.1
gcatccctcgcttacgattaaactgggttgttcaaatgcgacccgattcagcaatgctagaagcaatagccgtggttacattggctttacgatgatacctatgagtctatagggtgaaacgaaggcgagggatgca

SEQ ID NO: 14817 - RNA, 141 nt, Pseudomonas karstica
  source 1..141: mol_type = other RNA; note = Related to NZ_WLYI01000015.1
gtgcatcccttgcctacgattaaactgggttgttcaaatgcgacccgattcagcaatgctagaagcaacagccagtggttccattggctttacgatgatacctatgagtctatagggtgaaacgcaggcgagggatgcatt

SEQ ID NO: 14818 - RNA, 139 nt, Pseudomonas benzenivorans
  source 1..139: mol_type = other RNA; note = Related to NZ_FNCT01000024.1
ccacctccacccgcaattaaataggttgttcaaatgcgacctgattcaaaaatgctataagcaactgccctacgctaatcctaatggttaacgtttggctacccttaagtctatagagtgaaatgcgggtgggggtttt

SEQ ID NO: 14819 - RNA, 141 nt, Pseudomonas fluorescens
  source 1..141: mol_type = other RNA; note = Related to NZ_CABVIZ010000005.1
tgtgctcccgcttgcgattaaactgggttgttcaaatgcgacccgattcagcaatgtagcaggctacagtcttgagttatatcttgagctgaatgttaagttatctatagtctatagggtgaagtgcaagcgggggcatct

SEQ ID NO: 14820 - RNA, 140 nt, Pseudomonas putida
  source 1..140: mol_type = other RNA; note = Related to NZ_CP061723.1
atgcccctgcttgcgattaaactgggttgttaaaatgcgacccgattcaacaatgctgcaggctacagtccctgggttatctcaggtgctgaatgttaagttatctctagtctatagggtgaagtgcaagcgggggcatt

SEQ ID NO: 14821 - RNA, 140 nt, Pseudomonas sp.
  source 1..140: mol_type = other RNA; note = Related to LKBT01000034.1
cgccctcccctagttaaaatcagggttgttaaaatgcgacccaagtcaacaacgttacatgcgatcgcatcgacggttacgccaaagtggttgcgatttactcatcggtaatcggtaaagtaaactaggggcagggtctt

SEQ ID NO: 14822 - RNA, 140 nt, Pseudomonas mandelii
  source 1..140: mol_type = other RNA; note = Related to NZ_AZQQ01000096.1
tttgctcgcccttagttaaactagggttgttaaaatgcgacccgagtcaaaaatgttacatgcgattgcctctacgtttactcaaagtggtagcaatttaattagcgctaatcggtaaagtaaactaagggcgagatcta

SEQ ID NO: 14823 - RNA, 147 nt, Halomonas populi
  source 1..147: mol_type = other RNA; note = Related to RZHD01000010.1
tttggcctcctcttgggggtttatcttggcggagtcaaatgccgctgaatgccaataacgtctgctcaaatcgcagcgtccggtacgccattgagattgaaatgtaaattggtgatgcggaaagtgaaacccaagagaaggcctatg

SEQ ID NO: 14824 - RNA, 151 nt, Marinobacter maritimus
  source 1..151: mol_type = other RNA; note = Related to NZ_VCGW01000002.1
tggcaacccggctcgtgattaatcttggcggttttaaatgctgcttaatgacaacgacgttaccacaaatcgcctctcagcacgttgctagcagcagctttgcaggcaaatttgagtaaagcgtaatgtgaaacttgagccgggcttttat

SEQ ID NO: 14825 - RNA, 139 nt, Cylindrospermum stagnale
  source 1..139: mol_type = other RNA; note = Related to NC_019757.1
tatcacttgcgggaataagtattgatttccgttgttgatcctgcgacggtgtatttgacggttagttttaacgacgcgcctagcgcgtttaattgcttttccttttccgagtaagcgagaatacacccgcgagtgatat

SEQ ID NO: 14826 - RNA, 144 nt, unidentified
  source 1..144: mol_type = other RNA; note = Related to LWHC01000033.1; note = Cyanobacterium sp. IPPAS B-1200
aatcacttgcgggataagttattgatttccattgttgatactgcgatggtgtattccaaggttagctttattacagtgtagtttcattgtaaattcatatattttatatatatgagtaaggtagaatacatccccaagtgattt

SEQ ID NO: 14827 - RNA, 141 nt, Halothece sp.
  source 1..141: mol_type = other RNA; note = Related to NC_019779.1
agtcacttgcgggataagtattgatttccgttgttgatcctgcgacggtgtattttacggtcagctttacacaaccaatcgtggttttgttatttattggcttttcgcaagcataagcgagaatatacccgcaagtgatta

SEQ ID NO: 14828 - RNA, 155 nt, unidentified
  source 1..155: mol_type = other RNA; note = Related to PXPI01000109.1; note = Cyanobacteria bacterium SW_9_44_58
agtcacttgcgggataagtattgatttccgttgttgatcctgcgacggtgtattttactgttagctttacccgagtcgcgatcgtgtcgttcctttatatcatgcgttctatggctctctatgggaagaagttggaatgctcccgcaagtgattt

SEQ ID NO: 14829 - RNA, 158 nt, unidentified
  source 1..158: mol_type = other RNA; note = Related to RFIJ01001009.1; note = Bacteroidetes bacterium
agagatgcccggggtaggtattgatttccgttgttgatcctgcgacggttcaaaccaaggtttgctttatgcgactcccaggtctggggatggttgatgttcctagtttctggactcgacgccacgccataggtgagaatacacgccgggcatctctc

SEQ ID NO: 14830 - RNA, 130 nt, Microcoleus sp.
  source 1..130: mol_type = other RNA; note = Related to JACJPD010000044.1
ggatgtctatagagaaatattgattccgttgttgatcctgcgacggcgttatccaaagtcagctttacgctcgatcgaattaatccgattgcgatttgcagtaagcgagaatatattctgtagacatcct

SEQ ID NO: 14831 - RNA, 145 nt, Plectonema radiosum
  source 1..145: mol_type = other RNA; note = Related to NZ_JADEWL010000096.1
ttggatactcgtttaaatgattgattcccgctgttgatcctgcggcggtatatttttgaaggtcaacgtatatacacgtgatcattcttttaattacttagcgattgctagggtagtaagttggaatatacagcgagtatccaat

SEQ ID NO: 14832 - RNA, 144 nt, Leptolyngbya sp.
  source 1..144: mol_type = other RNA; note = Related to QBMH01000079.1
ttaggtactcgtacaaaattgattcccgctgttgatcctgcggcggtaatgttctaaggggtagcatatatatgccctcgtccagtgactttccctggtgccttccagtgcatagtaggttggaatatgttgcgagtatctaac

SEQ ID NO: 14833 - RNA, 144 nt, Pseudanabaena yagii
  source 1..144: mol_type = other RNA; note = Related to NZ_JAAVJL010000001.1
ctaggtattcgtgcaaaattgattcccgttgttgatcctgcgacggtaatgcatcaaggggtacgatatatacctcgttataacactgttacgcaaccttacgaactgttagtagtaagttagaatctggtacgagtacttagc

SEQ ID NO: 14834 - RNA, 150 nt, unidentified
  source 1..150: mol_type = other RNA; note = Related to JAIPEW010000016.1; note = Clostridiales bacterium
gtatgtggagtttgggaattgattttcgttgttgatcctgcgacgaatatggatggttaactttacgtgctttttcatatctttggtatgcctgtttcatgttacttggctcagagatgcagtaagcagaattccaaactccatcatata

SEQ ID NO: 14835 - RNA, 161 nt, unidentified
  source 1..161: mol_type = other RNA; note = Related to JACDEG010000211.1; note = Pyrinomonadaceae bacterium
tcgggcgtttgcggaccctattgactccctgccgttgttactgcggcagatacgacaagggtagcctgatagctgccggtgatcgttcattgttcagcctcaatgctactcacagctttaccgtggaggcagtaagcagaataagttcgcggacgcccgcc

SEQ ID NO: 14836 - RNA, 149 nt, Nitrospira sp.
  source 1..149: mol_type = other RNA; note = Related to MSXN01000018.1
gttgggcttgcgggatgtattgaagtctgttgttgatcctgcgacaggtcaaatcaaggggccatatatgcctcttgtgctttacgtgtatagcttacagtgtttacctcttgttcttggcagaaggcggaatacccgcaagccctcct

SEQ ID NO: 14837 - RNA, 141 nt, unidentified
  source 1..141: mol_type = other RNA; note = Related to JACPLU010000002.1; note = Parcubacteria group bacterium
aaaagggtgtgataacaattgattgccgttgtgtttcgcgacggatgagaaacggttccttttacttgctttatgtgcgtaatgttatggatatagacattaccgtgcttgcagaaagagaatttaaatcgcacccttttt

SEQ ID NO: 14838 - RNA, 149 nt, Ruminiclostridium sp.
  source 1..149: mol_type = other RNA; note = Related to DOHN01000106.1
gtatatgggagtaaagtaattgatttttcgttgttgatcctgcgacgataatggaatggttagggcaacgtgccttactattatttatttacttcatctttattcctagctgctcctcggcaataagtagaattatactcccatatact

SEQ ID NO: 14839 - RNA, 147 nt, unidentified
  source 1..147: mol_type = other RNA; note = Related to JAFQLB010000113.1; note = Lachnospiraceae bacterium
aaacataggagaatttattttcgttagtgttaccgcaacgatgtatgacgatgttaggcagagatccgttctctgtttactcctctgtttagaaaacaatcagaatttattctgaatgttggataaggtagaattctcctatttttt

SEQ ID NO: 14840 - RNA, 145 nt, unidentified
  source 1..145: mol_type = other RNA; note = Related to JAKITL010000008.1; note = Gammaproteobacteria bacterium
ttgagcctccctcttctatatttgccgtcgatactgcggtagagaaatcaataccctcctttacgcatcctcggctactgggtgtcaatgtggctgaatatgcgattgcgttatcctgcgtaaagtgcgaggagggaggctcact

SEQ ID NO: 14841 - RNA, 157 nt, Nitrosomonas sp.
  source 1..157: mol_type = other RNA; note = Related to FOSP01000012.1
gggtgcgtccttcttctatatttgctgttgatcctgcggcagaaaaacacgatgtttcccattatgctcatttactcgttgtagtggtactgagcttattgttacttttagtatttatcttgcgtatttgcgtaaggtgcgaggaaggatgcgctca

SEQ ID NO: 14842 - RNA, 138 nt, unidentified
  source 1..138: mol_type = other RNA; note = Related to JABIUT010001148.1; note = Candidatus Scalindua sp.
aatgcccccactctctaaatttgctgttgatcctgcggcagaaaacagcgtagttatttcttacgactgtgttacgttatgttatgattgttattactttagtgttgccttgtataaagaatgagggtgggggtgttc

SEQ ID NO: 14843 - RNA, 153 nt, unidentified
  source 1..153: mol_type = other RNA; note = Related to CP066225.1; note = Planctomycetes bacterium
ataagcccctagatcttcagtatggccgtcgatcccgcggctacccattgtaatgttcttctatatgcgttacgacgatcatcaatattcgctacgtcattatgttgtgtcgttgcgtcgttggcaaaaggaaagatgatctaggggcttttt

SEQ ID NO: 14844 - RNA, 164 nt, unidentified
  source 1..164: mol_type = other RNA; note = Related to JAFLKZ010000048.1; note = Campylobacteraceae bacterium
caagagatactttatacattctatatttgctgtgcacctgcggcagacaacaaaattgtttctaattaagcttaccttatgagtttctgattgtgatgcttagtgtcctaacttgtacgctttgaatcgcataataaaagtgtgattgataaagtatctctcta

SEQ ID NO: 14845 - RNA, 152 nt, Sulfurimonas sp.
  source 1..152: mol_type = other RNA; note = Related to MIBX01000109.1
acgggatgctttacgtattctatatttgctgttgttcctgcggcagacaacaaaaatgttctttattaatagattgtgaactcttaaaaatctgttaacttatctttatatactagtttgattataaagtgcgattagtgaagcatcccaat

SEQ ID NO: 14846 - RNA, 151 nt, unidentified
  source 1..151: mol_type = other RNA; note = Related to JAGBOM010000008.1; note = Opitutales bacterium
aaatgcttcccctttctatcttccgaggcgttcctgcttcgttatattcaaagttcttccttatggtatatcgattgattactattgttgaataatattacaatattatctatcgtccaatctatataaagagcgaaaggggaagcacctc

SEQ ID NO: 14847 - RNA, 141 nt, Gluconobacter frateurii
  source 1..141: mol_type = other RNA; note = Related to NZ_BEWN01000005.1
aggcttacaggcagaattgttgtccggcttcgagacatatgtaccaatgttaggagagctcttgtgcttccctgatacttattgcggtttgtctgttttaatcagatcgcccattgttcgcgtaggagtgcctgtaagctt

SEQ ID NO: 14848 - RNA, 141 nt, Mesorhizobium sp.
  source 1..141: mol_type = other RNA; note = Related to SAQI01000010.1
aggcttacaggcagatttgttgtccggcttcgagacatatgtaccaatgtcaggaggtctcttgtgcttccttgacacttattgcgggttatccgtttcgttcagattgcccgatattcgcgtaggagtgcctgtaagcct

SEQ ID NO: 14849 - RNA, 148 nt, Entomobacter blattae
  source 1..148: mol_type = other RNA; note = Related to CP060244.1
cggcttacaggcagaattgttgtccggattcgagacatatgtaccaatgccaagctacgcttgtgcttctttaacacttattgcgggttaaacatttcgtttgtttaaatagcccgtatgttcatcgcgtaggagtgcctgtaagcct

SEQ ID NO: 14850 - RNA, 141 nt, Qipengyuania flava
  source 1..141: mol_type = other RNA; note = Related to JAGHQS010000002.1
aggcttacaggcagaattgttgtccggattcgagacatatgtaccaatgccaggagggcacttgtgctcccttgacacttattgcggtttgaacattttgttcaagttgcccgatgattgcgtaggagtgcctgtaagcct

SEQ ID NO: 14851 - RNA, 140 nt, Thalassospira xiamenensis
  source 1..140: mol_type = other RNA; note = Related to JAINWB010000007.1
tggcttacaggcagaattgttgtccggtttcgagacatatgtaccaatttcaggagggcttttgtgcttcctggatacttattgcgggctattcgtgtgtttagattactcgatgtacgcgtaggagtgcctgtaagcct

SEQ ID NO: 14852 - RNA, 141 nt, unidentified
  source 1..141: mol_type = other RNA; note = Related to JADGDA010000026.1; note = Alphaproteobacteria bacterium
aggcttacaggcagaattgttgtccggatttcgagacatatgtaccaatgctggggagaggtttgtgctcccttgacacttattgcccgagctgtttgtgatctatgggctgaatgttcgcgtgggagtgcctgtaagccc

SEQ ID NO: 14853 - RNA, 146 nt, Rhizobium pusense
  source 1..146: mol_type = other RNA; note = Related to NZ_QAYR01000012.1
aggcttacaggcagaattgttgtccggtttcgagacatatgtaccaatgcaaggggagtgtttgtgcttcctacgtttccaatgcctgcatgatttctatgggattacgccggcttataccttcgcgtaagagtgcctgtaagccg

SEQ ID NO: 14854 - RNA, 147 nt, Labrenzia sp.
  source 1..147: mol_type = other RNA; note = Related to JADOUL010000002.1
aggcttacaggcagaattgttgtcttgcttcgaggcatatgtatcaaggtcaggagagcggttgtgcttcctgatgcctattatggccttatcggtatcgtgaatattgatcaatgagccaattcgcataagagtgcctgtaagcct

SEQ ID NO: 14855 - RNA, 142 nt, Angulomicrobium tetraedrale
  source 1..142: mol_type = other RNA; note = Related to NZ_JACICD010000010.1
tggcttacgggcagaattgttgtccggtttcgagacatatgtaccaatgccaggggagcgcttgtgctaccatggaacgtattgccgatttgggcggaatggcttgtcggcgtgacgatcgcgtaagagtgcccgtaagcct

SEQ ID NO: 14856 - RNA, 138 nt, Acidocella sp.
  source 1..138: mol_type = other RNA; note = Related to NCFD01000067.1
aagtttacaggcagaattgttgtccggtttcgagacatatgtaccaatgtcagatggacgtttgtgctacctgatgttcttattgcacaatgtatatcttattatactatgtgatcgcgtaggagtgcctgtaagctt

SEQ ID NO: 14857 - RNA, 139 nt, unidentified
  source 1..139: mol_type = other RNA; note = Related to JAFKKU010000016.1; note = Hyphomicrobiales bacterium
cagcttgcgggcagatttgttgtccggattcgagacatatgtgaccatgccaggaaagcgcttgtgctaccctgcgtcttaatgcttggcatctataaatcgaggtgcttggcgtacgcgtaagagtgcccgcaagctt

SEQ ID NO: 14858 - RNA, 143 nt, unidentified
  source 1..143: mol_type = other RNA; note = Related to JACKIO010000012.1; note = Rhodospirillales bacterium
ggacttgcaggcagacttgttgtccgggttcgagacatatgaagaaacgtcaggagggcatttgtgcttccctgatgcttattgcggtccgattatatgcaatgtttaacgcaccgtgatcgcgtaggagtgcctgcaagtcc

SEQ ID NO: 14859 - RNA, 138 nt, unidentified
  source 1..138: mol_type = other RNA; note = Related to JABGZD010000203.1; note = Proteobacteria bacterium
ggacttgcaggcagacttgttgtccgggttcgagacatatgatgcaatgtcaggagagcgcttgtgcttccccgatacttattgcggtatgaatgaacgaatgattcgccgtaatcgcgtaggagtgcctgcaagtcc

SEQ ID NO: 14860 - RNA, 145 nt, unidentified
  source 1..145: mol_type = other RNA; note = Related to VYFW01000066.1; note = Gammaproteobacteria bacterium
ggacttgcaggtagatttgttgtccgggttcgagacatatgattcaatgtcaggaaagcgcttttgctgccctgattcctattccgactttactcgtcaagagttttgtcgaactgcgtgattgcgtaggagtgcctgcaagtcc

SEQ ID NO: 14861 - RNA, 144 nt, Henriciella algicola
  source 1..144: mol_type = other RNA; note = Related to NZ_QWGA01000003.1
gagcttgcgggtagatttgttgtccggattcgagacatatgaagaaatgcgggggaacatctgtgcttccctgaaccatactgcggcatactgtgtgctgtgttacggtgatcgtcgtgatcgcgtatgagtgcccgcaagcct

SEQ ID NO: 14862 - RNA, 140 nt, Gluconobacter oxydans
  source 1..140: mol_type = other RNA; note = Related to NZ_BARJ01000009.1
tgacttgtaggtagacttgttgtccggtttcgagacatatgaaccaacgtcaggagtgcacttgtgcttccctgagacttattgcggttaatacgatttaatctatattctccgtttcgcgtaggagtacctacaagtca

SEQ ID NO: 14863 - RNA, 144 nt, Rhizobium sp.
  source 1..144: mol_type = other RNA; note = Related to NWSX01000001.1
gggcttgcaggcagacttgttgtccggattcgagacataagattcaacgctagggggcctcttgtgcttccctggtccatattgcggttactggacctgcctattggttcatcgccgtgctcgcgtaagagtgcctgcaagtcc

SEQ ID NO: 14864 - RNA, 130 nt, Bradyrhizobium erythrophlei
  source 1..130: mol_type = other RNA; note = Related to NZ_LT670818.1
aagcttacaggcagatttattatcgtgtttcgcgatatatgatccaaagtcaggcacgctgctccctatgatccatgattgaaacatatggcccatggcctatgcgacgcgtaggagtgcctgtaagcct

SEQ ID NO: 14865 - RNA, 128 nt, Bradyrhizobium sp.
  source 1..128: mol_type = other RNA; note = Related to JADPKY010000194.1
aagcttacaggcagatttgttatcgtgtttcgcggtatatgaaccaatgtcagggacgctgctccctatacgatcctcgatgcatatggccaatggcccatgcgacgcgtaggagtgcctgtaagccc

SEQ ID NO: 14866 - RNA, 130 nt, Bradyrhizobium sp.
  source 1..130: mol_type = other RNA; note = Related to JACIHF010000027.1
aagcttacaggcagattcgttgtcgtgtttcgcgatatatgattcgatgtcagggacgctgctccctgtgatccgtatgatatgtttcggcctatggcctgcgcgctcgcgtaggagtgcctgtaagcct

SEQ ID NO: 14867 - RNA, 130 nt, Bradyrhizobium sp.
  source 1..130: mol_type = other RNA; note = Related to FOUS01000020.1
aagcttacaggcagatttgttatcgtgtttcgcgatatatgatccaacggcaggagcgctgctcctgagcgatgctcaatgatctccaggtatgatggcctgcgcggcgcgtaggagtgcctgtaagcca

SEQ ID NO: 14868 - RNA, 128 nt, Arboricoccus pini
  source 1..128: mol_type = other RNA; note = Related to NZ_FYEH01000004.1
aagcttacaggcagatttgttatcgtgtttcgcgatatatgatccaatgtctcggacgctgctccctacaggctgctctatgtcagcatgatgtgatgcacacttcgcgtaggagtgcctgtaagcct

SEQ ID NO: 14869 - RNA, 132 nt, Bradyrhizobium elkanii
  source 1..132: mol_type = other RNA; note = Related to NZ_AXAP01000106.1
aggcttacaggcagatttgttatcgtgcttcgcgatatatgattcaatgtccccggatgctgctccgagacgacgagctcgatgagtgcatggcgaaccacccatgcggcgcataagagtgcctgtaagcct

SEQ ID NO: 14870 - RNA, 132 nt, Bradyrhizobium sp.
  source 1..132: mol_type = other RNA; note = Related to JAFCMB010000001.1
aggcttacaggcagacttgttgtctcgttattgaggcatatgaaccaatgttgagggctgtcgctcctcgacgctcctggacggcgcgctggtataattgcacgtcgtacgcataagagtgcctgtaagctc

SEQ ID NO: 14871 - RNA, 132 nt, Phenylobacterium sp.
  source 1..132: mol_type = other RNA; note = Related to MEEX01000061.1
aggcttgcagacagacttgttgtctcgttattgaggcataagaaacaatgttggggacggtcgctcctcgacgctccttcagggacgcatcgtcgatgggccatgcgcacgcgtaagagtgtctgcaagccc

SEQ ID NO: 14872 - RNA, 126 nt, Brevundimonas diminuta
  source 1..126: mol_type = other RNA; note = Related to NZ_JAENJN010000015.1
aggcccacaggcagacttgttgtcgcgttattgcggcatatgaaacaacgtcagggcgtcagccctatgacgctatacgcgccgatgcgattggtgctgatcatgcgtaggagtgcctgtgggccg

SEQ ID NO: 14873 - RNA, 143 nt, Oricola thermophila
  source 1..143: mol_type = other RNA; note = Related to NZ_CP054836.1
ccgcttacaggcagaattgttatcgcgtatcgcgatataagaaacaatgtcaggagggaatcgcttcccgacgatccttaatgcctattcgtttgtgatgaatggacgaaaactgggtatcgcataggagtgcctgtaagcat

SEQ ID NO: 14874 - RNA, 139 nt, unidentified
  source 1..139: mol_type = other RNA; note = Related to PBKC01000100.1; note = Rhodospirillaceae bacterium
gggcttacaggcagatttgttatcgcgtttcgcgatatatgacttgctgtcaggaggcgttgcttcccgacgatccttaatgcgcgttcaatcgatacgatgcgatgcgcatggtacgcttaagagtgcctgtaagcct

SEQ ID NO: 14875 - RNA, 135 nt, Brevundimonas sp.
  source 1..135: mol_type = other RNA; note = Related to NZ_JAGHQP010000025.1
tggcttacaggcagatttatcgtcgagtttcgcgacgtatgaagcaatacgacttgtcgttgcttcctaataacccttaatctatttgcccatatgcgggcgactggatgatcgcataggagtgcctgtaagcct

SEQ ID NO: 14876 - RNA, 141 nt, Hartmannibacter diazotrophicus
  source 1..141: mol_type = other RNA; note = Related to NZ_LT960614.1
cggcttacaggcagatttgtcgtcgtgtttcgcgacgtatgaagcaatactacttagagttgcttccctatgaacccttattgctatttgaccacttaatggcaaatgcacttgcgatcgcataggagtgcctgtaagccc

SEQ ID NO: 14877 - RNA, 139 nt, Bradyrhizobium sp.
  source 1..139: mol_type = other RNA; note = Related to NZ_PSRS01000004.1
gagcttacaggcagatttattgttgcgctatcgcaacataagaccgaaggtcagaggccaatgcttcctgactgcagaattatgcacgttcaatgcggaatacgaaatcgcatgatcgctaaggagtgcctgtaagctc

SEQ ID NO: 14878 - RNA, 135 nt, Lichenihabitans sp.
  source 1..135: mol_type = other RNA; note = Related to NZ_CP085136.1
aggcttacaggcagacttgttatcacgtctcgtgatatatgaaccaatgtgacccaatgtttgctcaccgaggggcgatacgatcgatcaatcgatgggcgatccgtgcctacgcgtaggagtgcctgtaagccg

SEQ ID NO: 14879 - RNA, 135 nt, Methylobacterium tarhaniae
  source 1..135: mol_type = other RNA; note = Related to NZ_LABZ01000002.1
cggcttacaggcagatttgttatcgcgtatcgcgatatatgaaacaatgtcaggcggcgtttgctctccgactgacgatcatggatatgggacattatgggctgatggcctacgcataggagtgcctgtaagccg

SEQ ID NO: 14880 - RNA, 143 nt, Chlorobaculum sp.
  source 1..143: mol_type = other RNA; note = Related to SDGU01000027.1
ttgcttacaggcagatttgttgttgtgcttcgcaacataattatagacgtaagggggttttgctccttttcgtatccttattgcacggcgttcaatgttcgctgtcagttgttctgaggtcgcataggagtgcctgtaagcaa

SEQ ID NO: 14881 - RNA, 136 nt, Legionella santicrucis
  source 1..136: mol_type = other RNA; note = Related to NZ_LNYU01000023.1
aagcttatgaacagatttgctatcgtgtttcgcgatatattcatccaatgttggatgctttgctttcattacgcttttaaagcagcagcaattagtaaatatacactagttatcgcataagagtgttcataagcta

SEQ ID NO: 14882 - RNA, 137 nt, Neoasaia chiangmaiensis
  source 1..137: mol_type = other RNA; note = Related to NZ_CP014691.1
aggcttacaggcagagttgttatcgcgtatcgcgatataagacatcgatgttgggcagtgatgcttccaactacccttattgcagctgcaaagctgagcggacgatcgatcggtcgcataggagtgcctgtaagccg

SEQ ID NO: 14883 - RNA, 138 nt, Altererythrobacter sp.
  source 1..138: mol_type = other RNA; note = Related to AP018498.1
aggcttacaggcagagttgttatcgcgcatcgcgatataagacaccgatgttaggcagtgatgcttccatctacccttattgcagcatttccgctgagcggacgatctgatcgtacgcataggagtgcctgtaagccg

SEQ ID NO: 14884 - RNA, 138 nt, Sphingopyxis witflariensis
  source 1..138: mol_type = other RNA; note = Related to NZ_NISJ01000021.1
aggcttacaggcagagttgttatcgcgcatcgcgatataagacaccgatgttaggcagtgatgcttccatctacccttattgcagctttacggctgagcggacgatccgatcgaacgcataggagtgcctgtaagccg

SEQ ID NO: 14885 - RNA, 139 nt, Sphingobium sp.
  source 1..139: mol_type = other RNA; note = Related to NZ_CP046252.1
aggcttacaggcagagttgttatcgagaatcgcgatataagacaccgatgttgggcagtgatgctctccatctacccctaatgcagctttaccgctgagcggacgatctgatcgaacgcataggagtgcctgtaagcca

SEQ ID NO: 14886 - RNA, 138 nt, Erythrobacter sp.
  source 1..138: mol_type = other RNA; note = Related to JAACTB010000013.1
cggcttacaggcagagttattatcgcgcatcgcgatatacgacaacgatgttgggcagcgatgctcccattgagaaactttgtgtaactgaccgttatagaacgttcgtgacgaacgcataggagtgcctgtaagcca

SEQ ID NO: 14887 - RNA, 140 nt, Bradyrhizobium arachidis
  source 1..140: mol_type = other RNA; note = Related to CP030050.1
gggcttacgggcagagttgttatcgcgcatcgcgatataagacaaagatgccaaatctcgattgcttcctgagcaatcgtaatgcgacgagtgtttgaccagtgaatgctcggtgatcgcataggagtgcctgtaagccc

SEQ ID NO: 14888 - RNA, 141 nt, Methylobacterium sp.
  source 1..141: mol_type = other RNA; note = Related to JAKSYA010000167.1
tggcttgcaggtagagttgttatcgcgtatcgcgatataagataaggatgttaggaggcgattgcttcccgtattccattattgcgctttcatgatggtccattatgggtcgtcatctcgcatatgagtacctgcaagctt

SEQ ID NO: 14889 - RNA, 140 nt, Methylobacterium pseudosasicola
  source 1..140: mol_type = other RNA; note = Related to NZ_FOTK01000017.1
aagcttgcaggcagagttgttatcgcgcatcgcgatataagctaagaatgtcaggaggcgattgcttcccatgaccccttattgcagatctatgatccgcatcactgacgaccataccgcataagagtgcctgcaagctt

SEQ ID NO: 14890 - RNA, 142 nt, Methylobacterium terricola
  source 1..142: mol_type = other RNA; note = Related to NZ_VDDA01000005.1
aagcttgcaggcagagttgttatcgcgccatcgcgatataagagaacgatgccgggaggtgattgcttcctatggcgtcttaatgcataaaaatgatcagacggtatgagcgatcgtatcgcataggagtgcctgcaagccc

SEQ ID NO: 14891 - RNA, 144 nt, unidentified
  source 1..144: mol_type = other RNA; note = Related to JAGWBW010000022.1; note = Candidatus Latescibacteria bacterium
tggcttacaggcagaactgtatcgcgtatcgcgataaaagataaaatgttaggatgtgttgttgcttcgtccaattctttaatgcggcattttcgttgttgttgtgtttgtgtgtgtgtttcgcataggagtgcctgtaagccg

SEQ ID NO: 14892 - RNA, 144 nt, unidentified
  source 1..144: mol_type = other RNA; note = Related to VXMB01000009.1; note = Gemmatimonadetes bacterium
cggcttacaggcagaatgctatcgcgcatcgcgatacaagacgaaacggtgggatgtgagtacgccgcttttcctttctgcgattcaatgtctgtctgttgcattgatcggatcggcagttcgcgtaggagtgcctgtaagcca

SEQ ID NO: 14893 - RNA, 142 nt, unidentified
  source 1..142: mol_type = other RNA; note = Related to JAIPDZ010000080.1; note = Deltaproteobacteria bacterium
tggcccatggacagatttattattgtgtatcgcaatataagaaaccaatgtcagggcggattgcttcctggctatcctttttgcagtgtattttatgtcccagtatactgtgttactctcgcataagagtgtccatgggcca

SEQ ID NO: 14894 - RNA, 141 nt, unidentified
  source 1..141: mol_type = other RNA; note = Related to JAGGXD010000009.1; note = Bacteroidales bacterium
tggctcatggatagatttgttattgtgtatcgcaatatacgaaaccaaagtcaggatggattgcttcctggttatcctttatgcagtatatctgaatgtccactgtatactgtattatcgcataagagtgtccatgagcca

SEQ ID NO: 14895 - RNA, 144 nt, unidentified
  source 1..144: mol_type = other RNA; note = Related to JAKISH010000034.1; note = Gammaproteobacteria bacterium
tgactcatggatagatttattattgtgtatcgcaatataagaaactaatgtcaggatggatttgcttcctgataatcctttacgcagtgtgccagtatgacttggttacagtgttacatatcgcataagagtatccatgagtca

SEQ ID NO: 14896 - RNA, 144 nt, unidentified
  source 1..144: mol_type = other RNA; note = Related to JAFDMD010000032.1; note = Deltaproteobacteria bacterium
tggctcatagtcagatttattattgcgcatcgcaatataagaaataatgccaggttgtgttacttcctgacaatcattcgttgctattggttatgttataatatagttatattacatttctcgcataggagtgtctatgagccg

SEQ ID NO: 14897 - RNA, 126 nt, Nitrospira sp.
  source 1..126: mol_type = other RNA; note = Related to JAGQKD010000345.1
gggtctataggcagatttgttattgcgtatcgcagtataagaaaccaatgtcgggaggcttgcttcctcgactcccttgtagcacttggctaggtgtcacctgtgcaaaagagtgcctatagaccc

SEQ ID NO: 14898 - RNA, 146 nt, unidentified
  source 1..146: mol_type = other RNA; note = Related to JAGNKF010000015.1; note = Syntrophaceae bacterium
aggcttataggcagatttattgttgtgaatcgcaaccataagaaaccaatgtcaccggggttcgcttacccagtatactattggctacgtatctttagatgtgtatgcatatagctaccttctcgcaaaagagtgcctataagcct

SEQ ID NO: 14899 - RNA, 148 nt, Geomonas sp.
  source 1..148: mol_type = other RNA; note = Related to NZ_CP087999.1
cggcttgtaggcagatttgttattgtgaatcgcaatataagaaaccaaagtcagggagtgttgcttcccacagacgtaccgcactttggctactagcattatgactttacgttacttgacgttatcgcttaagagtgcctacgagccg

SEQ ID NO: 14900 - RNA, 126 nt, Desulforhopalus singaporensis
  source 1..126: mol_type = other RNA; note = Related to NZ_FNJI01000013.1
tgacttataggtagatttgttattgtgtttcgcaattatatgaaaacaaaggtaggtagacttgcctccctgatccttcgcttatcctgtgagatcctgatctcgcataagagttcctataagtca

SEQ ID NO: 14901 - RNA, 142 nt, unidentified
  source 1..142: mol_type = other RNA; note = Related to DNTK01000207.1; note = Bacteroidales bacterium
tggctcataaacagatttgttattgtgtttcgcaatatatgaaactaatgtttagactcattagtgcttattaatctttatgcttattaatatttataatgtttttaagcttttctagacgcataggagtgtttatgagcct

SEQ ID NO: 14902 - RNA, 135 nt, Geomonas paludis
  source 1..135: mol_type = other RNA; note = Related to BLXY01000001.1
cggcttataggcagatttattgatgcgtttcgcattcataagaaaccaatgttacgttggcagttgttgcttttcggtgtcccatagtattacgtactgttcgcctattactcgcataagagtgcctataagccg

SEQ ID NO: 14903 - RNA, 140 nt, unidentified
  source 1..140: mol_type = other RNA; note = Related to NZ_LVJN01000020.1; note = Proposed Magnetofaba australis
aggcttacaggcagacttgttatcatgtttcgtgatatacgtaaccaatgttaggtaggctttgctccctaacgttccttctgtcagcttggcgtttcgctatgctgtgcaacgttccgcataggagtgcctgtaagcct

SEQ ID NO: 14904 - RNA, 141 nt, unidentified
  source 1..141: mol_type = other RNA; note = Related to CP064988.1; note = Rhodospirillales bacterium
gggcttgcaagcagatttgttgtcgtgtctcgcgacataagatcgaacgtcagaggggattgctccccaggatgctcgaagcgcgcatagcgtcacgtaacggatagcctagcggtttcgcgtaagagtgcttgcaagccc

SEQ ID NO: 14905 - RNA, 147 nt, Methylobacterium sp.
  source 1..147: mol_type = other RNA; note = Related to JAKSYD010000289.1
cggcttgcgggcagatttgttgtcgcgaatcgcggcataagacaacgatgtcagggggtacttgctcccaggcaacgatcctagaagagcatactcgatgacgcctaaagtaaatccgcggcgttgcataggagtgcccgcaagctt

SEQ ID NO: 14906 - RNA, 141 nt, Ruegeria pomeroyi
  source 1..141: mol_type = other RNA; note = Related to JAGQAF010000003.1
gggcttacgggcagacttcctgctgcgcatcgcggcaaatgacaacaatggtaggcaggctgcttaccttcaggttcccttgcggtatcttccggttttccggtgtatcgccgacgctcgcataagagtgcccgtaagcac

SEQ ID NO: 14907 - RNA, 136 nt, Rhizobium leguminosarum
  source 1..136: mol_type = other RNA; note = Related to JAGIOQ010000002.1
cagcttacgggcagacttcctgctgcgtatcgcggcaaatgacgacaatggtagccgtgctgctacctcaggttccttgcggtacttcggattatttgagtatcgcctacgctcgcataagagtgcccgtaagcat

SEQ ID NO: 14908 - RNA, 141 nt, Acidithiobacillus caldus
  source 1..141: mol_type = other RNA; note = Related to NZ_LZYE01000077.1
tgccttacgggcagacttccggctgcgcatcgcggcaaatgacaacaatggtaggcgtgctgcttacgtctaacttcttttgcgatatttggagttctctatcatgtatcgcttactttcgcttaagagtgcccgtaagca

SEQ ID NO: 14909 - RNA, 140 nt, Paracoccus luteus
  source 1..140: mol_type = other RNA; note = Related to NZ_SDEA01000026.1
atgcttacgggcagacttcctgccgcgcatcgcggcaaatgataacaatggtaggcaggctgcttaccttcaggttcccttgcggtgtttccggttttccggtgtatcgccgacgctcgcataagagtgcccgtaagcac

SEQ ID NO: 14910 - RNA, 145 nt, Labrenzia sp.
  source 1..145: mol_type = other RNA; note = Related to JAGHRJ010000002.1
ttgcttacgggcagacttactgctgcgtatcgcggcaaatgacaacaacggtaggcagtctgctgtccatcggtctttctttgcgatttcatatggttatcctattgaaatcctgcaacttcgctcaaggagtgcccgtaagcgc

SEQ ID NO: 14911 - RNA, 143 nt, Rhizobium leguminosarum
  source 1..143: mol_type = other RNA; note = Related to NZ_JAAXDY010000025.1
gtgcttacgggcagaattactactgcgcatcgcggtaaatgacaacaatggtaggcaggctgctgctcacctacggtcccttttgcatggccacggacaatatgatcgatgagccatcgacgcataggagtgcccgtaagcac

SEQ ID NO: 14912 - RNA, 143 nt, unidentified
  source 1..143: mol_type = other RNA; note = Related to JAHJTN010000036.1; note = Bacteroidetes bacterium
tggcttacgggcagacttcctgctgcgaatcgcggcaaatgacaaaaatggtaggcaggctgctgaccgaccatgatccctttgcaatcgttcggttatacctgatgattgacctgagatcgcgtaagagtgcccgtaagctc

SEQ ID NO: 14913 - RNA, 148 nt, Ciceribacter sp.
  source 1..148: mol_type = other RNA; note = Related to JAGRRC010000006.1
gagcttgcggacagatttaatgtcgcgcatcgcgacatatgatccgaatggttggcactctgctttccatcagatttcttttgcggattttcgagttttcgaattttcgtatttgcttaccacatcgcataagagtgtccgcaagcta

SEQ ID NO: 14914 - RNA, 142 nt, unidentified
  source 1..142: mol_type = other RNA; note = Related to JAIERP010000170.1; note = Mycobacteriaceae bacterium
gagcttacgggcagaattggtgccgcgtttcgcggcatatgacaacaatggtaggcacgctgcttcccatatgaaaatctttgcggactttccgttcatctggaaaattcgctacacatcgcaaaagagtgcccgtaagctc

SEQ ID NO: 14915 - RNA, 135 nt, Denitrobaculum tricleocarpae
  source 1..135: mol_type = other RNA; note = Related to NZ_ML660062.1
gagcttgcgggcagaattactgccgcgcaatcgcggcaaatgacaacaatggtaggcatgctgctttccgtccatgatccctttgcgaatatctatgaatattcggtcgtctcgcataagagtgcccgcaagctc

SEQ ID NO: 14916 - RNA, 141 nt, unidentified
  source 1..141: mol_type = other RNA; note = Related to JACKJA010000002.1; note = Rhodospirillales bacterium
aggcttgcgggcagacttcttgctgcgcatcgcggcaaatgacaacaacggtaggtgggctgctcatcaccgtgatccttttgcggacagtcctcatggaccatgtctcgccgattatcgcttaagagtgcccgcaagcct

SEQ ID NO: 14917 - RNA, 132 nt, Haliangium ochraceum
  source 1..132: mol_type = other RNA; note = Related to NC_013440.1
aagcttacgggtagactttctgctgcgcatcgcggcaaatgaaaacaatggtagggcatgatgctctccgttgcatgtatctttgcggatctttattcgacattacagtcgcctaggagtacccgtaagcgt

SEQ ID NO: 14918 - RNA, 124 nt, Bosea sp.
  source 1..124: mol_type = other RNA; note = Related to NZ_MZXU01000017.1
gtgcttacgggcagacttcctgctgcgtatcgcggcaaatgacaacaatgttaagcgggctgcttcccgttatagatcctttgcagatatctgccatagatcgcataagagtgcccgtaagcaa

SEQ ID NO: 14919 - RNA, 131 nt, unidentified
  source 1..131: mol_type = other RNA; note = Related to PDSV01000021.1; note = Gammaproteobacteria bacterium
gggcttacgggcagaattattatcgcgtatcgcgataagtgacaacaatactagaacctagtgcttaaaggtatcttaaaggacgaaaggaattaaaggattcgtcttcgcgtaagagtgtccgtaggcct

SEQ ID NO: 14920 - RNA, 121 nt, unidentified
  source 1..121: mol_type = other RNA; note = Related to JAFECG010000019.1; note = Proteobacteria bacterium
aagcttgtgagcagatttatgatcgcgtttcgcgatctatgacagaaatgtccagagtactgcctctacgctacaactctttatcgctcgcaacctcacgcagaggagtgctcacaagctt

SEQ ID NO: 14921 - RNA, 127 nt, unidentified
  source 1..127: mol_type = other RNA; note = Related to LOEV01000045.1; note = Alphaproteobacteria bacterium BRH_c36
aagcttgtgggcagacttatgatcgcgtttcgtcgatctatgacaacaatgttgggggcactgccctaatcggtgcttccttagtgcaactcggaaaacctcatcgcagaggagtgcccacaagctc

SEQ ID NO: 14922 - RNA, 153 nt, Parvularcula sp.
  source 1..153: mol_type = other RNA; note = Related to PAIP01000075.1
gaacccacaggcagacttatcgtcgcgaatcgcggcgtatgaaaacaatgttggcgacgctgctcccaacgccatcccagtgctgtacagtgttgtccagcgttatcatggactgcacatctatgcgtatcgcaaaggagtgcctgtgggttt

SEQ ID NO: 14923 - RNA, 145 nt, Ruegeria atlantica
  source 1..145: mol_type = other RNA; note = Related to WVQY01000005.1
gagcttgtgggcagaattatcgttgcgctatcgcgacgtgtgagatgaaacagcaggtgctgctatcatcaagacactttatgcattcgtagactattcgatgcaggctgatccgatgagatcgcataagagtgcccacaagctc

SEQ ID NO: 14924 - RNA, 131 nt, Mesorhizobium albiziae
  source 1..131: mol_type = other RNA; note = Related to NZ_FOSL01000011.1
gggcttgcggatagattctgctgttgttgtttcggcgatagttgatatcaatgcacggcttactgcccgaccattccttacggactgtcctatgtggtccgacgccttggcgaacgagtatccgcaagccc

SEQ ID NO: 14925 - RNA, 131 nt, Hoeflea sp.
  source 1..131: mol_type = other RNA; note = Related to JAHRFK010000006.1
tggcttgcggatagattctgctgttgttgtttcggcgatagttgatatcaatgcagggcttactgcccgaccattccttacggactgtccaatgttgtccgacgcttttgcaaacgagtatccgcaagcca

SEQ ID NO: 14926 - RNA, 130 nt, Mesorhizobium sp.
  source 1..130: mol_type = other RNA; note = Related to JAIUHW010000003.1
tagcttgcggatagattctgctgttgttgtttcggcgatagttgatatcaatgcagggcttactgcctgaccattccttacggactgaccatattgtccgctgccttggcaaaagagtatccgcaagcct

SEQ ID NO: 14927 - RNA, 131 nt, Rhizobium sp.
  source 1..131: mol_type = other RNA; note = Related to NZ_JACIFL010000022.1
aagcttgcggatagattctgctgttgttgtttcggcgatagttgatatcaatgcagggcttactgcctctacattccttccggactgctccacacggtccgacgctatggcgaacgagtatccgcaagccc

SEQ ID NO: 14928 - RNA, 132 nt, Agrobacterium vitis
  source 1..132: mol_type = other RNA; note = Related to NZ_WPHT01000004.1
tggcttgcggatagattctgctgttgtgtttcgcgatagttgataccaatgcgcggggcattgcccgacgcattcctcacggactgtcatccgctggtccaccgaccttggcaaacgagtatccgcaagcct

SEQ ID NO: 14929 - RNA, 131 nt, Agrobacterium rhizogenes
  source 1..131: mol_type = other RNA; note = Related to JAAMEU010000005.1
aggcttgcggatagattctgctgttgtgtttcgcgatagttgataccagtgcgcggggcattgccctacgcattccttacggactgttcacccatggtccgatgacttggcaaacgagtttccgcaagcct

SEQ ID NO: 14930 - RNA, 130 nt, Pseudochrobactrum sp.
  source 1..130: mol_type = other RNA; note = Related to NZ_ANNO01000019.1
aggcttgcggatagattctgctgttgtgcttcgcgatagttgataccaatgcgcgggccattgcccatgcattccttacggactgttctcggatcgtccgataacttggcaaacgagtgtccgcaagccc

SEQ ID NO: 14931 - RNA, 131 nt, Mesorhizobium sp.
  source 1..131: mol_type = other RNA; note = Related to NZ_AP023262.1
gtgcttgcggatagattctgctgttgttgtttcggcgatagttgatatcaatgcgcggggttctgcccgcacattccttacggactgtatacccatgtccgatgctctggcatacgagtatccgcaagcca

SEQ ID NO: 14932 - RNA, 129 nt, Aurantimonas coralicida
  source 1..129: mol_type = other RNA; note = Related to JAJGNB010000034.1
tggcttgcggatagatttttctgttgtgcttcgcgacagttgactacatggctcgggggattgcccccgcgaccaccctgtgatcgttattcgagattatgcgtatggcgaacgagtatccgcaagcca

SEQ ID NO: 14933 - RNA, 129 nt, Mesorhizobium sp.
  source 1..129: mol_type = other RNA; note = Related to NZ_VFVY01000001.1
cggcttgcggatagattttgctgttatgtatcgtgacagttgatattattgcaccaggcaatgcctgggcactccttccggattgcttcatgcgacccgatcgtatggcgtacgagtatccgcaagccc

SEQ ID NO: 14934 - RNA, 125 nt, Bradyrhizobium sp.
  source 1..125: mol_type = other RNA; note = Related to NWTG01000019.1
cggcttgcggatagatttttctgttgtgcttcgcgacagttgatatgaatgccacgggtaatgcgcgctccttgcagatcgctatgatcggacgacacatctggcgtacgagtatccgcaggccg

SEQ ID NO: 14935 - RNA, 125 nt, Bradyrhizobium sp.
  source 1..125: mol_type = other RNA; note = Related to JAGKJI010000032.1
cggcttgcggatagattttgctgttgtgcttcgcgacagttgatatgaatgcacgcgggaatgcgcgctccttgcagatcgctatgatcgtgcgaacaatctggcgtacgagtatccgcaagccg

SEQ ID NO: 14936 - RNA, 125 nt, Bradyrhizobium sp.
  source 1..125: mol_type = other RNA; note = Related to NZ_CP086136.1
aggcttgcggatagattttgctgttgtgcttcgcgacagttgatatgaatgcgcgtaggaatgcgcgctccctgcagttcgctgcgactatgcgtccgatctggcgtacgagtatccgcaagcct

SEQ ID NO: 14937 - RNA, 138 nt, Sinorhizobium medicae
  source 1..138: mol_type = other RNA; note = Related to RPJW01000006.1
cagctcgcggatagatttttctgtcgtgtttcgcgacggttgagtgcagtgccacggtcaatgctaattacagcatgggccggcaatggttaaaatcctatcgttatctgacgatcgccaacgagtatccgcgagcct

SEQ ID NO: 14938 - RNA, 137 nt, Agrobacterium rhizogenes
  source 1..137: mol_type = other RNA; note = Related to JAAMCX010000003.1
ttgctcgcggatagatttttctgtcgtgtttcgcgacggttgattacactgtcacggtcaatgctgatcacagtatgggctgatatggtttaaatcctatcgttatctgacgatcgccaacgagtgtccgcgagcct

SEQ ID NO: 14939 - RNA, 138 nt, Rhizobium smilacinae
  source 1..138: mol_type = other RNA; note = Related to NZ_VDMN01000001.1
ctgctcgcggatagatttttctgtcgtgtttcgcgatggttgactacgccgttacggtcaatgctgaatacagtacggaccgctatactgtaaaatcctatcgtcacctgacggtcgccaacgagtatccgcgagcct

SEQ ID NO: 14940 - RNA, 138 nt, Ensifer sp.
  source 1..138: mol_type = other RNA; note = Related to JACVAS010000003.1
gagctcgcggatagatttttccgtcgtgtttcgcgacggttgagtgcgctgtggcggtgaatgctttccgagagtatgacccgacacggttcgaattctatcgttatctgacaatcgccaacgagtatccgcgagctt

SEQ ID NO: 14941 - RNA, 136 nt, Mesorhizobium sp.
  source 1..136: mol_type = other RNA; note = Related to SADI02000019.1
ccgctcgcggatagatttttctgtcgtgcttcgcgacagttgaatgtactatgagggccgatgctttccacagcgtggacctcgacggaatgacctgatcaacatccgacaatcgcctacgagtatccgcgagcct

SEQ ID NO: 14942 - RNA, 132 nt, Rhizobium sp.
  source 1..132: mol_type = other RNA; note = Related to VCHT01000005.1
gggcttgcggacagattttgttgccaagtttcatggcagttgaaaccattgttgggtgatttgcctgacgatacttacagacgatgcaatattggataattcctacgttcgcataagagtgtccgcaagcct

SEQ ID NO: 14943 - RNA, 131 nt, Rhizobium lusitanum
  source 1..131: mol_type = other RNA; note = Related to CP050308.1
gggcttgcggacagattttgttgccaagtttcatggcagttgaaaacattgtcaggcagtttgcccgacgatacttccagatgatgggatttgtataatatctccgctcgcataagagtgtccgcaagcct

SEQ ID NO: 14944 - RNA, 131 nt, Rhizobium grahamii
  source 1..131: mol_type = other RNA; note = Related to NZ_KZ857258.1
gggcttgcggacagattttgttgccaagtttcatggcagttgaaagcatggtcaggcggtttgcccgacaatacctacagatgatgcgctattggacaattcgtccttcgcaaaagagtgtccgcaagcct

SEQ ID NO: 14945 - RNA, 143 nt, Rhizobium mongolense
  source 1..143: mol_type = other RNA; note = Related to JACIGM010000003.1
aggcttgcggatagattttggtgtcatggctcgtgacacttgaaaacaatgctgccggcaatgctgacaggttcctccgatcgctggtccgactgatacacacgggctatgcgcttcaatcgcatacgagtatccgcaagccc

SEQ ID NO: 14946 - RNA, 141 nt, Rhizobium leguminosarum
  source 1..141: mol_type = other RNA; note = Related to SIOG01000001.1
aggcttgcggatagattttggtgtcgtgtgttcgtggcacttgaaagaaatgctgccagcaatgctgaacagttatccgcatgtccattcaatattggatatctactatgcgctacatcgcatacgagtatccgcaagcct

SEQ ID NO: 14947 - RNA, 142 nt, Enterovirga sp.
  source 1..142: mol_type = other RNA; note = Related to NZ_JABEPP010000002.1
cggcttgcggatagattttgcggcgctgcttcggcgtcgttgaagtcaatgtctgggcgatgctccagcctttgaactgcctttcgaacaggcgaatgacaatgcatagaatgcgaatacgcgtacgagtatccgcaagcca

SEQ ID NO: 14948 - RNA, 137 nt, Methylobacterium sp.
  source 1..137: mol_type = other RNA; note = Related to NZ_LSKN01000098.1
cgacttgcggatagatttttctacaatgtttcgttgtagttgaaaccatcgtggagccgactgctctccgaacactgaccgacattatatgatcccggcaaatatgcgcgaagacgcataagagtatccgcaagtcg

SEQ ID NO: 14949 - RNA, 143 nt, Rhizobium laguerreae
  source 1..143: mol_type = other RNA; note = Related to JAAXSB010000004.1
atgcttgcggatagatttttctatgatgcttcgtcatagttgccatcgttgtggaggcgtttgctttcccgacttcctaatgattcgatttcggataatctaatatacgatttcgactttcgcataagagtatccgcaagcat

SEQ ID NO: 14950 - RNA, 136 nt, Mesorhizobium amorphae
  source 1..136: mol_type = other RNA; note = Related to NZ_CP015318.1
aggcttgcggatagattttgctgtgatgattcgtcacagttgaaaccatcgtggagggttttgctctcccggtacctgacgactccgaatggggcctgcatgatctgcgaatgcgcaaacgagtatccgcaagccg

SEQ ID NO: 14951 - RNA, 144 nt, Mesorhizobium sp.
  source 1..144: mol_type = other RNA; note = Related to VFVE01000003.1
cggcttgcggatagatttttctgtgggggttctccacagttgaaagcaagacggccttagtgcttcccgaagtatcccgacgagaagcagcatgtaacggtatgacgatgacacgcgaagtcgcgtaggagtatccgcaagccg

SEQ ID NO: 14952 - RNA, 138 nt, Aminobacter aminovorans
  source 1..138: mol_type = other RNA; note = Related to CP015005.1
cggcttgcggatagatttttctgtgggggttctccacaggtgaaagcaagacggccttagtgcttcccgaagagggacgacgaggagcattacgttaagcgaccatacgctggatcgcgtaggagtatccgcaagcct

SEQ ID NO: 14953 - RNA, 139 nt, Mesorhizobium sp.
  source 1..139: mol_type = other RNA; note = Related to JAIUGR010000007.1
cggcttgcggatagatttttctgtgggggatcttcacaggtgaaagcaagacggcctcagtgctacctgcagagtgccgacagtaacatgacgatatgggcgatactacgctgaatcgcttaggagtatccgcaagcca

SEQ ID NO: 14954 - RNA, 139 nt, Mesorhizobium sp.
  source 1..139: mol_type = other RNA; note = Related to CAAF010000028.1
tggcttgcggatagatttttctgtgggggttctccacaggtgaaagcaatacggcctcaacgctacctgcagagagccgacgagagcatgacgatttgggcgataatacgctggatcgcgtaggagtatccgcaagcca

SEQ ID NO: 14955 - RNA, 144 nt, Mesorhizobium mediterraneum
  source 1..144: mol_type = other RNA; note = Related to NZ_JHQU01000117.1
tggcttgcggatagatttttctgtgggggttcctcacaggtgaaaccaacacggccttagtgctgcccgaagagcgacgacgagaagcagcatataacggtataacggcaatacgcgaagtcgcgtaggagtatccgcaagcca

SEQ ID NO: 14956 - RNA, 136 nt, Mesorhizobium sp.
  source 1..136: mol_type = other RNA; note = Related to SAKE01000022.1
cggcttgcggatagatttttctgtgggggttcctcacaggtgaaggcaagacggctctagtgcttcccggagaatgcgacgagggcgatacgttatggtccattatgctacatcgcataggagtatccgcaagccg

SEQ ID NO: 14957 - RNA, 137 nt, Mesorhizobium sp.
  source 1..137: mol_type = other RNA; note = Related to RZTV01000003.1
cggcttgcggatagatttttctgtggggactctccacaggtgaaagcaacgtggctctagtgcttcccgaaggggcaacgaagagcaatacatcgagtctacaatacgctagatcgcataagagtatccgcaagtcc

SEQ ID NO: 14958 - RNA, 126 nt, Bradyrhizobium japonicum
  source 1..126: mol_type = other RNA; note = Related to NZ_AJQB01000700.1
cggcttgcggacagatttttctatcatgcgttcgtgatagttgaaaccaatgcctgtcagaatgcctctgcaggtcccaacgcttaaggatccgctcgttgagcgccaaagagtgtccgcaagcca

SEQ ID NO: 14959 - RNA, 128 nt, Bradyrhizobium sp.
  source 1..128: mol_type = other RNA; note = Related to JACIHC010000005.1
cggcttgcggacagatttttctatcatgcgttcgtgatagttgaaaccaatgcctgcgagaatgccactgcaggtcctaacgcttaagggtatccgctcgttgagcgccaaagagtgtccgcaagcca

SEQ ID NO: 14960 - RNA, 125 nt, Bradyrhizobium diazoefficiens
  source 1..125: mol_type = other RNA; note = Related to NZ_AP022641.1
cggcttgcggacagatttttctatcatgtttcgtgatagttgaaaccaacgccggcaagactgcctcggcagatctcaacgctcaagacgatgctcgacgagcgcataagagtgtccgcaagcca

SEQ ID NO: 14961 - RNA, 125 nt, Mesorhizobium amorphae
  source 1..125: mol_type = other RNA; note = Related to NZ_JHQS01000008.1
aggcttgcggacagattcttctatcatgtttcgtgataggtggaaaagttgctggggtggattgcccacctgcggtttctacaatttatcgatgtctcttcgtgcctaggagtgtccgcaagccg

SEQ ID NO: 14962 - RNA, 126 nt, Mesorhizobium loti
  source 1..126: mol_type = other RNA; note = Related to NZ_KB913026.1
tggcttgcggacagatttttctatcatgattcgtgataggtgacgcaattgccgcagggattgcctacctgcggtttctacaagcttttcgtgacttgacgtgcgctaaagagtgtctgcaagcca

SEQ ID NO: 14963 - RNA, 127 nt, Phenylobacterium sp.
  source 1..127: mol_type = other RNA; note = Related to JACIZA010000145.1
aagcttgcggatagatcttgctgccgtgcttcgcggcggttgatgggacgttccaatgaatgcccctacgacgattccaaatattacatgtaaacccacgggtttgccaaagagtatccgcaagcca

SEQ ID NO: 14964 - RNA, 129 nt, Rhizobium leguminosarum
  source 1..129: mol_type = other RNA; note = Related to JACJIU010000009.1
tgatccgcaggcagatttttccgccatgtattgtggcggctataaagagcgtacagtgggattttccctacgcgccttatccttacggttcgctaaaccgtgttccgacgaaagagtgcttgcggatcg

SEQ ID NO: 14965 - RNA, 128 nt, Rhizobium leguminosarum
  source 1..128: mol_type = other RNA; note = Related to CP090117.1
tgatccgcaggcagatttttccgccatgtattgtggcggctataaagagcgtacaacgggattttccctacgcgccttatacttacggttcgaaaaccgcgtattgacgaaagagtgcttgcggatcg

SEQ ID NO: 14966 - RNA, 128 nt, Rhizobium sp.
  source 1..128: mol_type = other RNA; note = Related to NZ_CP054023.1
agatccgcaggcagatttttccgccatgcattgtggcggctataaagagcgtacagagggattttccctacgcaccttaagactgacggttaataaccgtgtgacgacgaaagagtgcttgcggatcg

SEQ ID NO: 14967 - RNA, 126 nt, unidentified
  source 1..126: mol_type = other RNA; note = Related to JAHIXO010000053.1; note = Alphaproteobacteria bacterium
cgatccgcaagcagattcttctgccatgcattgtggtgggtagaaagattgtacgctgggatttttcctacgcgccttacattcacggtaaaaaccgtgtgcttactaaagagtgcttgcggatca

SEQ ID NO: 14968 - RNA, 125 nt, Agrobacterium tumefaciens
  source 1..125: mol_type = other RNA; note = Related to JAALYX010000005.1
tgatccgcaagcagatttttctgccatgtattgtggtgggtataaagattgtacgctgggatttatcctacgcgccttactataccgataataatcgtgtattactaaagagtgcttgcggatca

SEQ ID NO: 14969 - RNA, 128 nt, Sinorhizobium meliloti
  source 1..128: mol_type = other RNA; note = Related to NZ_RPKX01000022.1
tgatccgcaagcagattcttctgccatgtattgtggcggctataaagaacgtagcctggggttttccccttacgtaccttgatattacggttaaatcaccgtgtgaacgaaagagtgcttgcggatca

SEQ ID NO: 14970 - RNA, 127 nt, Sinorhizobium meliloti
  source 1..127: mol_type = other RNA; note = Related to WISN01000076.1
tgatccgcaagcagattcttctgccatgtattgtggcggctataaagaatgtagggcgggttttccaccttacgtaccttgatattacggttttaaaccgtgtgtacaaaagagtgcttgcggatcg

SEQ ID NO: 14971 - RNA, 126 nt, Sulfitobacter dubius
  source 1..126: mol_type = other RNA; note = Related to NZ_FOPG01000001.1
cgatccgcaagtagatttttccgccattttttgtggcggctataaatattgtggccggggtttccctgagcaccttacagataatggtataacaccatgcgactgctaaagagtgcttgcggatca

SEQ ID NO: 14972 - RNA, 125 nt, Sinirhodobacter populi
  source 1..125: mol_type = other RNA; note = Related to NZ_SAUW01000046.1
agatccgcaagcagatccttccatcatgcattgtgatggctatacagaacgtcagcgggctttcctcctgcgtatccttacattacggttaattaccgtgttgacgaaagagtgcttgcggatca

SEQ ID NO: 14973 - RNA, 135 nt, Pelagivirga dicentrarchi
  source 1..135: mol_type = other RNA; note = Related to NZ_QNQP01000022.1
cagccttcgggcagattttgtcatcatgttcattgtgatggttggccgcaacgctggtcagatttgctcttcgagttcctttgcagttttacggattgtagaaatccttgcctgcgtaagagtgcccgaaggcta

SEQ ID NO: 14974 - RNA, 132 nt, Nioella sediminis
  source 1..132: mol_type = other RNA; note = Related to NZ_MNBL01000032.1
tagcttgcgggtagattttgtcgtcgtgcttcatgacgtttgcacccattgttaggtgtgatgctctcttcgagttccctttagtcttcctcatgtaaacctctggtttgcctaaggagtactcgcaagcgc

SEQ ID NO: 14975 - RNA, 134 nt, Ensifer sp.
  source 1..134: mol_type = other RNA; note = Related to LMGC01000024.1
aagcttgcgggcagatcttgtcgtcgcgcatcgcgacggttgctgacaatgtcaggcctgattgctccttccggagtacccttacgttcatctacgggaaatcccgtgacacgcatacgagtgcccgcaagcga

SEQ ID NO: 14976 - RNA, 134 nt, Sinorhizobium meliloti
  source 1..134: mol_type = other RNA; note = Related to AGVV01000148.1
acgcttgcgggtagatcctgtcgtcgcgcatcgcgatggttgctgacaatgtcaggcctgattgctcctctcggagtacctttacgttattctacgggaaatcccgtgacacgcatacgagtacccgcaagcga

SEQ ID NO: 14977 - RNA, 134 nt, Rhizobium leguminosarum
  source 1..134: mol_type = other RNA; note = Related to NZ_SIQZ01000001.1
aagcttgcgggtagatcctgtcgtcgcgcatcgcgacggttgctgacaatgtcaggcctgattgctccttccggagtacccttacgttcttctacgggaaatcccgtgacacgcatacgagtgcccgcaagcga

SEQ ID NO: 14978 - RNA, 143 nt, Sphingomonas sp.
  source 1..143: mol_type = other RNA; note = Related to NZ_CP053347.1
aggaccgtgaacagaattttctgctgagtttcttggcagttgagaagtacgcgagcagcgcttgctgctatgatgcgatcatgatgatatgatgttatgatgatcgattgacgatgatatcgcataagagtgttcacggtcca

SEQ ID NO: 14979 - RNA, 142 nt, Asaia bogorensis
  source 1..142: mol_type = other RNA; note = Related to NZ_BJVS01000002.1
aggatcgtgaacagatttttccgctgagtttctcggtggttgagaagtacgcaggcgccgcttgcttgtagtatacccaacaggaatacgatatcttaatgtcgaaatgactccgttatcgcaaaagagtgttcacgatccg

SEQ ID NO: 14980 - RNA, 142 nt, Sphingomonas sp.
  source 1..142: mol_type = other RNA; note = Related to NZ_CP019511.1
agggccgtggatagattttactgccgagtttcttggcagctgagaagtatgcgagcatcgctcgctaatacgatccagcaatgatgatgcgctttgagttacacatgcgacaccgcgtcgcctaaggagtgtccacggcccg

SEQ ID NO: 14981 - RNA, 141 nt, Tsuneonella amylolytica
  source 1..141: mol_type = other RNA; note = Related to NZ_CP032570.1
gcgaccgtgggcagaacgtactattgagaatctcgatagctgagtagtaagcaagcaacgctagcttctctgatgggactacttgaaatatttcttttacaatgtaacgcgacgttaccgcgtaggagtgcccacggtcac

SEQ ID NO: 14982 - RNA, 148 nt, Sphingopyxis sp.
  source 1..148: mol_type = other RNA; note = Related to JADBDT010000001.1
gggcctgtgagcagaaccttctgctgaagtttcgcggcagttgaatagtatgcgaggatttcttgctactggataaatcgacaatgatgatccgaataggacaattaatgcggattcaccggaatcgcatgagagtgctcacaggccc

SEQ ID NO: 14983 - RNA, 122 nt, Bartonella apis
  source 1..122: mol_type = other RNA; note = Related to LXYU01000002.1
aaactcacaggtagaagtgttatcttgtttcgagatatatttgttaatatcgacagctttgcttagctggtctacatgtgttactaagtaggtaagcttagtctaagagtacctgtgagttt

SEQ ID NO: 14984 - RNA, 136 nt, Vibrio parahaemolyticus
  source 1..136: mol_type = other RNA; note = Related to NZ_CP013248.1
tcgcttacgggcagaatttgagttgtgtatcgcaacttttgatataaatggcacgtgctatttgctacctttcggctattcgtctgatgaccaatagtttatcgttctacaatcgcgtaggagtgcccgtaagcaa

SEQ ID NO: 14985 - RNA, 137 nt, Pseudoalteromonas sp.
  source 1..137: mol_type = other RNA; note = Related to NZ_CP058972.1
acgcttacgggcagatttggactgcgcatcgcagtttttgatttatatgttactttgtgtttgctaccttatcggctcgtccgggtatgttgacgattcatcctatcatcatttcgcaaaagagtgcccgtaagccc

SEQ ID NO: 14986 - RNA, 148 nt, Aliidiomarina halalkaliphila
  source 1..148: mol_type = other RNA; note = Related to NZ_VJWL01000003.1
tggcttacgggcagaatttgggttgcgcatcgcaatctttgatacaaaagtctcgttacatttgctacctagcggtcgtccggtcggtttacatcgattcgactagtcgccctatgttttctcaaagcgtaggagtgcccgtaagcca

SEQ ID NO: 14987 - RNA, 130 nt, Photobacterium damselae
  source 1..130: mol_type = other RNA; note = Related to JABWTP010000017.1
acgcttacgggcagattttgagttgtgtatcgcaacttttgatataaatgctgaactgcatttgcttaccttatggccatactggccaattactcgttaattcttaacgcataagagtgcccgtaagcat

SEQ ID NO: 14988 - RNA, 130 nt, Vibrio splendidus
  source 1..130: mol_type = other RNA; note = Related to PIEV01000027.1
ctgcttacgggcagattttgagttgtgtatcgcaacttttgatacaaatgctgaactgtatttgcttaccttatggcctaaccggccagttactcgttaattcttaacgcataagagtgcccgtaagcac

SEQ ID NO: 14989 - RNA, 130 nt, Paracoccus sp.
  source 1..130: mol_type = other RNA; note = Related to NZ_CP025583.1
gagcctgtgggcagattttaccgttgtgcttcgcgacggatgaaaccaccgtcaggtggatatgccctatcgggtttccttcagcatatcttatgtgacccttcggttgcctaggagtgcccatgggctc

SEQ ID NO: 14990 - RNA, 131 nt, Litoreibacter arenae
  source 1..131: mol_type = other RNA; note = Related to NZ_KE557310.1
gagcgcgtgggcagattttaccgttgtgcgttcgcaacggatgaaaccactgttaggtggatatgccctatcgggtttccttcagcatattttatgtgacccttcggttgcctaagagtgcccacgggctc

SEQ ID NO: 14991 - RNA, 129 nt, Jannaschia marina
  source 1..129: mol_type = other RNA; note = Related to NZ_JABVAX010000004.1
gagcctgcgggcagattttaccgctgtgtttcgcagtggatgaaaccatcgtcgggtggatatgctccttccgtcatctttgcatatcttatgagacacttacgtttgcataggagtgcccgcaggctc

SEQ ID NO: 14992 - RNA, 126 nt, Vibrio parahaemolyticus
  source 1..126: mol_type = other RNA; note = Related to AAXMXP010000003.1
cggtttacaggcagattttgttattgcgtttcgcaataagtgaaaataatgttggaaacaaatgctcatattatgagatgcatcgtgaaaatgggctgcgccgagccagagagtgcctgtaaacca

SEQ ID NO: 14993 - RNA, 126 nt, Vibrio metschnikovii
  source 1..126: mol_type = other RNA; note = Related to NZ_JAHAMV010000022.1
aggcttacaggcagatttttttattgcgcttcgcgataagtgaaaaagacgttggaaacaaatgctcatattacggtaatgctcctgaaaatgggctgcgccgagcaaaggagtgcctgtaagctc

SEQ ID NO: 14994 - RNA, 129 nt, Micavibrio sp.
  source 1..129: mol_type = other RNA; note = Related to NC_016026.1
aggcttacggacagaaatttgattgtgattcgcaatctatgaaaaaaatgttaggcaagtaagctgctacattcaacccgcatgctatgatgagggcaccccctcaggcaaaagagtgtccgtaagcca

SEQ ID NO: 14995 - RNA, 126 nt, Alteriqipengyuania halimionae
  source 1..126: mol_type = other RNA; note = Related to NZ_WTYR01000001.1
agatctgcgggcagattttttgtagtgtttcgctacacgtgaaaagaatgtgagagggaattgcccctatcgtatacactttgcaatccttatgtgatgttatcgcgtaggagtgcccgcagatcg

SEQ ID NO: 14996 - RNA, 142 nt, Salinarimonas rosea
  source 1..142: mol_type = other RNA; note = Related to NZ_AUBC01000017.1
gggttggcaggtagtttcgttgccgcgtttcgtggcatgagaaaaaatggccagggttcgtctgcttccttggcttctttatgcatctcggcttactcgatttgagatgcggactacatcgcataagagtacctgccaaccc

SEQ ID NO: 14997 - RNA, 140 nt, unidentified
  source 1..140: mol_type = other RNA; note = Related to JAAUTN010000370.1; note = Leptolyngbyaceae cyanobacterium SM1_4_3
ggacttgtaggcagattttatgtcatgtttcgtgacacttgaaacaaatgctgaaagcatagctttcagtgttttctatagcacttagcattagctatgtttggtgttcttcgcgttcgcaaaggagtgcctgcaagtcc

SEQ ID NO: 14998 - RNA, 140 nt, unidentified; identical to SEQ ID NO: 14997
  source 1..140: mol_type = other RNA; note = Related to JAAUQZ010000187.1; note = Leptolyngbyaceae cyanobacterium RM1_406_9

SEQ ID NO: 14999 - RNA, 136 nt, unidentified
  source 1..136: mol_type = other RNA; note = Related to JAAUUH010000063.1; note = Oscillatoriales cyanobacterium SM2_2_1
ggacttgtaggcaaattttgtgtcatgcttcgtgacacttgaaacaaatgctgctgccaatgctgacagtgaatccctatagtacataacatgcttatgataccttctgcgttcgcaaaggagtgcctgcaagtcc

SEQ ID NO: 15000 - RNA, 134 nt, unidentified
  source 1..134: mol_type = other RNA; note = Related to PHCH01000051.1; note = Betaproteobacteria bacterium HGW-Betaproteobacteria-4
gggcctacagacagaccttgtgccattgtttcgtggcatttgaaaaaaatgttgggggctatgctctcggcggtcctatccatgtgggtaaccttggggttcccatagcgtcgcgtaagagtgtctgtaggccc

SEQ ID NO: 15001 - RNA, 136 nt, Halothiobacillus sp.
  source 1..136: mol_type = other RNA; note = Related to NCKJ01000107.1
gggcttgctgatagatttttttgccacgtatcgtggcaagtgaaactaacggcagaagctatgctgctgttatgctgattttcccttgagttgagcaaaggtttgcgcggtaacgcgtaggagtatctgcaggccc

SEQ ID NO: 15002 - RNA, 128 nt, unidentified
  source 1..128: mol_type = other RNA; note = Related to JYOD01000041.1; note = Burkholderiaceae bacterium 16
gggcttacaggcagattttttaccatgtttcgtggtaagtgacaccaatgtccggggctatgccctcgatatctctcataaatcgcatattacgccatatgcgcctgcaaaagagtgcctgtaagcct

SEQ ID NO: 15003 - RNA, 133 nt, unidentified
  source 1..133: mol_type = other RNA; note = Related to NKIH01000004.1; note = Burkholderiales bacterium PBB6
gggcttagtggcagattttttgccatgtttcgtggcatgtgaaagcaatgtctggagctatgctcctcgactatctcctctacagtgattccttgaggatctctgcgtctcgcgagagagtgccactaggtcc

SEQ ID NO: 15004 - RNA, 136 nt, unidentified
  source 1..136: mol_type = other RNA; note = Related to JACZJU010000112.1; note = Burkholderiales bacterium
gggcctacagacagaccttgtgctgcgtatcgtggcacgtgaaataaatggcgagcggtatgctgcctatcgcctccttgacgcatcgacaaggtaacttgtccctgttgaatcgcgtaagagtgcctgtaggccc

SEQ ID NO: 15005 - RNA, 134 nt, unidentified
  source 1..134: mol_type = other RNA; note = Related to SHXF01000114.1; note = Betaproteobacteria bacterium
gggcctacagacagaccttgtgctgcgcttcgtggcacgtgaaataaatggcgagcggtatgctgcccttcgcctctttgacggatcgacgatggacttgtcgcctggtatcgcgtaagagtgtctgtaggccc

SEQ ID NO: 15006 - RNA, 143 nt, Sulfuritalea sp.
  source 1..143: mol_type = other RNA; note = Related to JADJFI010000002.1
gggcctacgggcagatcttgcgttatggaatcgtaacgcgtgaaattaatggcactaacgttttgctccttaccgtatcccttcacggtatgcaattattcagcatatccatttgcgggacgcataagagtgctcgtaggccc

SEQ ID NO: 15007 - RNA, 140 nt, Bordetella trematum
  source 1..140: mol_type = other RNA; note = Related to NZ_CP036357.1
tggcccataagcagatttttttgccattgtttcgtggcaagtgacaacaacggcaggagcattgctcctgtacgccccataatccctagtagttgactgggatatatccattgcatacgcttaggagtgcttgtgggcca

SEQ ID NO: 15008 - RNA, 145 nt, Bordetella sp.
  source 1..145: mol_type = other RNA; note = Related to NZ_NEVN01000010.1
gggcctacagacagattttttgccatcgtttcgtggcacgtgacaccaaaggcaggtgcattgctactatccatgtgcctgccacagtaaatccatgagtaaaatggaatgttctcagcattcgcataggagtgtctgtaggccc

SEQ ID NO: 15009 - RNA, 140 nt, Bordetella sp.
  source 1..140: mol_type = other RNA; note = Related to NEVU01000001.1
cggcctacaggcagattttttgccatcgtttcgtggcatgtgacagtaatggcaggtgcattgctcctgtcggtcccattaagcctcatgagtccatcatgtggtgtctgcgcatagcgcataggagtgcctgtaggcca

SEQ ID NO: 15010 - RNA, 135 nt, Quisquiliibacterium transsilvanicum
  source 1..135: mol_type = other RNA; note = Related to NZ_JACHGB010000002.1
cggcccctgggcagacgttttgtggcgtttcgccacaagtgcaatagctgggggaggcgttgcctccttactgctaccttatatctcgatttctcatgagatggtatgtcttcgcgtaagagtgcccaggggcca

SEQ ID NO: 15011 - RNA, 132 nt, Acidithiobacillus ferriphilus
  source 1..132: mol_type = other RNA; note = Related to JAAZTX010000005.1
tggctcaccggcagactttgtgccatgtttcgtggcatttgaaacaaacgctaggaagtatgcttctcttcctagacgtgtctgatagtgccagagtgtcagtgtctatcgcgtaggagtgccggtgtgcct

SEQ ID NO: 15012 - RNA, 130 nt, unidentified
  source 1..130: mol_type = other RNA; note = Related to QHVH01000010.1; note = Blastocatellia bacterium AA13
agactcaccggtagattttgtgccatgcttcgtggcatttgaaacaaatgtgagagggtatgccgacatagccttgcgacttgctctctaccatgcaatatgactttcgcgtaggagtaccggtgggtcg

SEQ ID NO: 15013 - RNA, 136 nt, unidentified
  source 1..136: mol_type = other RNA; note = Related to JADBLS010000169.1; note = Chloroflexi bacterium
agactcaccggcagatcttgtgccatgcttcgtggcatttgaagcaaatgtgagagggtatgctgactcacagcgcatgtgagtatgcgcatatccgtttcgctgtatgacttcgcgtaggagtaccggtgagtcg

SEQ ID NO: 15014 - RNA, 148 nt, unidentified
  source 1..148: mol_type = other RNA; note = Related to CP047423.1; note = Candidatus Nitrospira kreftii
agacgcaccggtagattttgtgccatgtttcgtggcatttgaaagaaatgtaaaaggctatgctgctcaccgtgtgcgccacacttcgcatggggtgcagtgtatcttgtgtctcgcgtgtctatcgcgtaggagtaccggtgcgtca

SEQ ID NO: 15015 - RNA, 134 nt, unidentified
  source 1..134: mol_type = other RNA; note = Related to JACQSX010000029.1; note = Acidobacteria bacterium
ggacccactaggcagactttgtgccatgtttcgtggcatttgaaacaaacgttagatcctatgctgtcctcgccgtgaatggcgatggtcctcgcgactctctcgtgtcttcgcgaaggagtgccggtgggtca

SEQ ID NO: 15016 - RNA, 131 nt, unidentified
  source 1..131: mol_type = other RNA; note = Related to JADZCM010000017.1; note = Bryobacterales bacterium
ggacccactcggcagattttgtgccatgtttcgtggcatttgaagcaaaggtcgggtactatgctgattctcgtctgcagatacgctgtatctgctggtgactggcttcgctaaggagtgccggtgggtct

SEQ ID NO: 15017 - RNA, 128 nt, Achromobacter sp.
  source 1..128: mol_type = other RNA; note = Related to JABBJN010000001.1
ccgcccaccgacagagtttgtgccatgtttcgtggcacgtgaaacaaaatggccgaggctttgcccggttacgttaatgtaagcaacgccattagtggtctcaactgcgtaagagtgtcggtgggctc

SEQ ID NO: 15018 - RNA, 131 nt, Massilia sp.
  source 1..131: mol_type = other RNA; note = Related to NZ_CP088952.1
agacctgcggtcagaccttgtgtcgcgattcgcgatacgtgtatcaattgtggggggctatgcttcctatcgatatcctagcagaagtagtcatggtgagccgtgcgccgccaaagagtttccgcaggtct

SEQ ID NO: 15019 - RNA, 130 nt, Massilia sp.
  source 1..130: mol_type = other RNA; note = Related to NZ_CP080379.1
agacctacggaaagactttgtatcgcgattcgcgatacgtgtttcaattgcttagggctatgccctcgtcgatgtccttgcatgggagcttgactgttaccatgcgttgccaatgagtttccgtgggtct

SEQ ID NO: 15020 - RNA, 130 nt, Massilia atriviolacea
  source 1..130: mol_type = other RNA; note = Related to NZ_RXLQ01000009.1
gggcctgcggtcagaccttgtaccgcgattcgcggtacgtgtatcaatggcttgggcctatgccctcgtcgatgtccttacatgattacttgaatgtagccatgcgtcgcaaatgagtgtccgcaggtcc

SEQ ID NO: 15021 - RNA, 135 nt, Variovorax sp.
  source 1..135: mol_type = other RNA; note = Related to JAHCDN010000001.1
gagcttgcaaacagatttttcaccatgtttcgtggtgatggacaacgatagtaggggctatgcccgttattccttaatcgtgtgagttgagcccgacgacaagggtgtcttccgcataagagtgtttgcaagctc

SEQ ID NO: 15022 - RNA, 138 nt, Burkholderia cenocepacia
  source 1..138: mol_type = other RNA; note = Related to NZ_JAGSTT010000006.1
ccgctttcgggcagaccttttgccatgtttcgtggcatgtgacaccaacggccgggacgttgctcctagtcgatatctcgccttaatagctgatcgcacgaatagcgattgcatacgcgtaagagtgcccgaaagccc

SEQ ID NO: 15023 - RNA, 124 nt, Paraburkholderia susongensis
  source 1..124: mol_type = other RNA; note = Related to FXAT01000001.1
cagctcgcggatagattttttgccatgaatcatggcatgtgaaataaaagttccgggatttgctcctcggatttcctctgcattatccgaattgcgccgtttgcgtaagagtatccgcgagcca

SEQ ID NO: 15024 - RNA, 128 nt, Paraburkholderia guartelaensis
  source 1..128: mol_type = other RNA; note = Related to SMOD01000073.1
cgactcgcggatagattttttgccatcgtttcatggcatgtgaagcaaatgttcgtggatatgctcctcggtatccctctatatattgcgagataatcgcagaaatgcgtaggagtatccgcgagtct

SEQ ID NO: 15025 - RNA, 132 nt, Duganella sp.
  source 1..132: mol_type = other RNA; note = Related to NZ_LMNW01000004.1
ttgcttgcggatagattttttgccattgtttcatggcatgtgaaataaatgttcccgggatatgcccctcggtatccctctgtatcgtcatccgatagtagcgcgaggttgcgtaagagtatccgcaagcat

SEQ ID NO: 15026 - RNA, 122 nt, Burkholderia sp.
  source 1..122: mol_type = other RNA; note = Related to QMFZ01000026.1
cgactcgcggatagattttttgccatgtttcatggcatgtgaagcaaatgttccgagatatgccctcggtatccctctgatactgcagatgcgcgccgatgcgtaggagtatccgcgagtct

SEQ ID NO: 15027 - RNA, 129 nt, Glaciimonas immobilis
  source 1..129: mol_type = other RNA; note = Related to JAAOZT010000003.1
ggattcgcggatagattttttgccatgtttcatggcatgtgaaatgaatgtcccgggatatgccctcggtatccctctattaccgctatgatgcgcttgctatgttcgcataggagtatccgcgaattt

SEQ ID NO: 15028 - RNA, 129 nt, Nitrosospira sp.
  source 1..129: mol_type = other RNA; note = Related to NZ_JXQM01000003.1
ggattcacggatagattttttgccatgtatcatggtatgtgaaacaaatgttccaggatatgctcctcggtatccctctgtaatactcgcagttcgcctggtgtaacgcataggagtatccgtgaatcc

SEQ ID NO: 15029 - RNA, 129 nt, Ralstonia solanacearum
  source 1..129: mol_type = other RNA; note = Related to NCTK01000001.1
gggctcgcggatagattttttgccatgtttcatggcatgtgaaaataatgttacgagatatgccctcggataccctctatgcggcgccatgaagggccggctacgatgcgtaggagtatccgtgagccc

SEQ ID NO: 15030 - RNA, 137 nt, Pelomonas sp.
  source 1..137: mol_type = other RNA; note = Related to JAJTWU010000005.1
ggactcgcggacagattttttgccatgcttcatggcatgtgaaacaaatgtccggggatatgctcctcggcgtccctcggtgttgcccggcatctcgctgagcaactgtgcggtcgcgtaagagtgtccgtgggtcc

SEQ ID NO: 15031 - RNA, 137 nt, Ottowia sp.
  source 1..137: mol_type = other RNA; note = Related to JAGREY010000320.1
ggattcacggacagattttttgccatgcttcgtggtatgtgaaacacaggtccggggatatgctcctcggtgcccctcgaggttgccctgcgtcttgctgagcaactgtgcgatcgcgtaagagtgtccgtgggtcc

SEQ ID NO: 15032 - RNA, 136 nt, Ralstonia solanacearum
  source 1..136: mol_type = other RNA; note = Related to WSYX01000004.1
ggactcacggacagattttttgccatgtttcatggcatgtgaaaagaatgtccggggatatgctcctcggcgtccctcgtgctgagctgcgagaagttgagcatctcggcgtccgcgtaagagtgtccgtgggtcc

SEQ ID NO: 15033 - RNA, 127 nt, Herbaspirillum seropedicae
  source 1..127: mol_type = other RNA; note = Related to NZ_CP034395.1
cgactcgcggatagattttttaccatggttcatggtatgtgaaataaatgtctggaaatatgccctcggatgccctctatactgatatcgatagagtagcggattgcataagagtatccgcgagtct

SEQ ID NO: 15034 - RNA, 128 nt, Xanthomonas campestris
  source 1..128: mol_type = other RNA; note = Related to JAJFMU010000006.1
ggactcgcggacagattttttgccatcgattcatggcatgtgaaatgaatgtctctagatatgccctcggatgttcctctgctggacgtacgtggtgcatggttgcgccagggagtgtccgcgagtcc

SEQ ID NO: 15035 - RNA, 128 nt, Xanthomonas bromi
  source 1..128: mol_type = other RNA; note = Related to FLTX01000075.1
ggactcgcggacagattttttgccatcgcttcatggcatgtgaaaaaaatgtctcgagatatgccctcggatgtccctctgtcgtacgtacgtggtgcatggttgcgccagggagtgtccgcgagtcc

SEQ ID NO: 15036 - RNA, 126 nt, Xanthomonas oryzae
  source 1..126: mol_type = other RNA; note = Related to NZ_CP092971.1
ggactcgcggacagattttttgccatcgtttcatggcatgtgaaaaaaatgtctcgagatatgccctcggatatcctctgtagtaagtacgtggtgcaagttgcgccagggagtgtccgcgagtcc

SEQ ID NO: 15037 - RNA, 131 nt, unidentified
  source 1..131: mol_type = other RNA; note = Related to DMZZ01000357.1; note = Comamonadaceae bacterium
ggactcgcaaacagattttttgccatgcttcatggcatgtgaaacaaacgtccgcaggaaatgctcctcggtgttcctcgccattcggccacgcgcgatccttgcgttcgcgtaggagtgtttgcgagtcc

SEQ ID NO: 15038 - RNA, 131 nt, Hydrogenophaga taeniospiralis
  source 1..131: mol_type = other RNA; note = Related to NZ_BCWR01000008.1
ggactcgcagacagattttttgccatgcttcatggcatgtgaaacaaacgtccgcaggaaatgctcctcggtgttcctcgccattcggctactcgcgatcattgcgttcgcgtaggagtgtttgcgagtcc

SEQ ID NO: 15039 - RNA, 133 nt, Rhodoferax sp.
  source 1..133: mol_type = other RNA; note = Related to NZ_CP019236.1
ggactcgcagacagattttttgccatgattcatggcatgtgaaagaaatgtccccgggaaatgctcctcggtatcctcgccgtattgcggcaatgcgcgtcccctgcgttcgcgtaagagtgtctgcgagtcc

SEQ ID NO: 15040 - RNA, 128 nt, Achromobacter mucicolens
  source 1..128: mol_type = other RNA; note = Related to CADIKS010000002.1
ttgcttgcgggcagaatttttgccatgtttcatggcaaaggaagggaacgttcgggatatatgccctcgtcgtactctattactccataatcatagcgttatcctgcttaaagagtgcccgcaagccc

SEQ ID NO: 15041 - RNA, 131 nt, Limnohabitans sp.
  source 1..131: mol_type = other RNA; note = Related to NZ_CXOO01000052.1
ggaccggtcagcagaccttttgccgcgcctatcgcggtatgtgaaaaaaatgtgtggggctatgcccctacgcttccttacgttacgccctctcggttactctgcgttggcgtatgagtgctgtccggtcc

SEQ ID NO: 15042 - RNA, 131 nt, Polynucleobacter yangtzensis
  source 1..131: mol_type = other RNA; note = Related to NZ_LOJI01000040.1
gaacctacaaatagaccttttgtcgtagattcgcgacatgtgaagtaaatgggtggggctatgcctcgtccgtaatcttttcttagttaactgtgcgtactaatgcgtcgcatatgagtatttgtaggttc

SEQ ID NO: 15043 - RNA, 137 nt, Thiorhodococcus sp.
  source 1..137: mol_type = other RNA; note = Related to NZ_AFWT01000016.1
gggtctatagtcagaatttgtgccatgtcatcgtggtacgtgaaagccaatgtgcggggctatgctggcaccgccgtccttgttgctgaggcatgatgctaagctccttgtttacgcaaaagagtgtctatagaccc

SEQ ID NO: 15044 - RNA, 126 nt, Sphingomonas azotifigens
  source 1..126: mol_type = other RNA; note = Related to NZ_BCTR01000096.1
aggctcgcggacagattttttgtcgcgtttcgcgacacgtgaagagaatgtgcgggagaattgctcctgcggtccatatgggcaatccctgagggtctacgcctgcgaaggagtgtccgcgagccg

SEQ ID NO: 15045 - RNA, 126 nt, Acetobacter oeni
  source 1..126: mol_type = other RNA; note = Related to NZ_WOTA01000025.1
tggctcgcggacagattttttgtcgcgcttcgcgacacgtgaaaagaatgtgcgggagaattgctcctgcggtcatttcggcaatcccttagggccttcagcttgcgaaggagtgtccgcgagcca

SEQ ID NO: 15046 - RNA, 127 nt, Sphingomonas hankookensis
  source 1..127: mol_type = other RNA; note = Related to NZ_JAKREV010000015.1
tggctcgcggacagattttttgtcgcgtttcgcgacacgtgaaaagaatgtgcgggagaattgctcctgcggtccatatgggcaatctctgagggccttacgcctgcgaaggagtgtccgcgagccg

SEQ ID NO: 15047 - RNA, 127 nt, Sphingomonas sp.
  source 1..127: mol_type = other RNA; note = Related to JACTGR010000001.1
aggctcgcggacagattttttgtcgcgcttcgcgacacgtgaaaagaatgtgcgggagaattgctcctgcggtccattcgggcaatccctatgggtctttcgactgcgaaggagtgtccgcgagcca

SEQ ID NO: 15048 - RNA, 126 nt, Sphingomonas sp.
  source 1..126: mol_type = other RNA; note = Related to NZ_LR733875.1
gggcttataggcagattttttatcgtgcttcgcgatacgtgaaactattgtccgagggattgctctggacgtgccttaatgtgcaatctttatgcgctatggctgcatacgagtgcctataagccc

SEQ ID NO: 15049 - RNA, 137 nt, unidentified
  source 1..137: mol_type = other RNA; note = Related to SCRQ01000059.1; note = Sinobacteraceae bacterium
aggcgggctggcagagtctgtgccatgtttcgtggcatgtgccaacaatgttgaaccctatgctcctatacctacacgtgaatccacgtgaccgggtatcggtgatgtgctgatcgcgaaagagtgccagcccgccg

SEQ ID NO: 15050 - RNA, 132 nt, Pseudomonas syringae
  source 1..132: mol_type = other RNA; note = Related to AP019411.1
aggcttacaggcagattttttgccgcgtttcgtcggcatttgaaaccatcgtgtcggagattgcttcgacgtgactcacaatttggcgcttcggaataccctgccgggacgcatatgagtgcctgtaagctt

SEQ ID NO: 15051 - RNA, 131 nt, Pseudomonas protegens
  source 1..131: mol_type = other RNA; note = Related to NZ_CP060289.1
aagcttacaggcagattttttgccgcgtttcgcggcatttgaaaccatcgtgtcggagattgcttctacgcgactcacaacttggcgcttcggaataccctgccgggacgcatatgagtgcctgtaagctt

SEQ ID NO: 15052 - RNA, 131 nt, Pseudomonas sp.
  source 1..131: mol_type = other RNA; note = Related to NZ_FYDY01000001.1
aagcttacaggcagattttttgccgcgtttcgcggcatttgaaaccatcgtgtcggagattgctcctacgcgactcacaagttggcggttcggaataccctgccgggacgcatttgagtgcctgtaagctt

SEQ ID NO: 15053 - RNA, 133 nt, Pseudomonas fragi
  source 1..133: mol_type = other RNA; note = Related to NZ_CP021132.1
aagcttacaggcagattttttgtcgcggttcgcgacatttgaaactatcgtggcggacattgctccttcgcgactcacaactgggcggttcaggagtttccctgtcgggacgcatatgagtgcctgtaagctt

SEQ ID NO: 15054 - RNA, 131 nt, Pseudomonas syringae
  source 1..131: mol_type = other RNA; note = Related to JACYWS010000004.1
aggcctacaggcagattttttaccacggatcgtggtatgtgaacctatcgtgtcggacattgctcctatgcgactcacaatggacgcgggatggaatctcctgacggacgcgtatgagtgcctgtaggccg

SEQ ID NO: 15055 - RNA, 133 nt, Pseudomonas fluorescens
  source 1..133: mol_type = other RNA; note = Related to CABVHP010000013.1
aggtttacaggcagatttttttaccacggttcgtggtacgtgaaaggttcgtgctggatattgcttctacgcgactcacaaagggatgcagggtgaataatcctgacggacgcatatgagtgcctgtaaacct

SEQ ID NO: 15056 - RNA, 131 nt, Pseudomonas fluorescens
  source 1..131: mol_type = other RNA; note = Related to CABVHX010000009.1
agccttacagacagattttttgccgcggatcgcggcagttgaaactatcgtgtcggagattgcttctacgcgactcacagttttacgccatgatgaatatccggcggacgcatatgagtgtctgtaaggct

SEQ ID NO: 15057 - RNA, 133 nt, Pseudomonas edaphica
  source 1..133: mol_type = other RNA; note = Related to NZ_JACAOZ010000012.1
aggcctacaggcagattttttgccacggttcgtggcatttgaaacaatcgtgcgggagattgctccttcgcgactcacagtttgacgccaaaatgaataatcctggcggacgcatatgagtgcctgtaagcct

SEQ ID NO: 15058 - RNA, 133 nt, Pseudomonas sp.
  source 1..133: mol_type = other RNA; note = Related to MUHV01000013.1
gagcttacaggcagatttttttgtcgcgtttcgcgacatttgaaaacatcatgtgggggattgcttcctgacgtgactcaacacgttgacgcgaaattcgtgtcggcggacgcatatgagtgcctgtaagcgt

SEQ ID NO: 15059 - RNA, 134 nt, Pseudomonas helmanticensis
  source 1..134: mol_type = other RNA; note = Related to NZ_SOCQ01000001.1
gagcttacaggcagatttttttgtcgcggttcgcgacatttgaaagtattgcgtgggagattgcttcctatcgtaactctacaagtttgacgcgaagttcgtgtcggcggacgcatatgagtgcctgtaagcgt

SEQ ID NO: 15060 - RNA, 132 nt, Pseudomonas aeruginosa
  source 1..132: mol_type = other RNA; note = Related to CP050147.1
gagcttacaggcagatttttttgccacggttcgtggcatttgagaaggtcgtgtgggagattgcttctatacgagtcacaagttatgcgctgaaagtgtgtctgacggacgcgtatgagtgcctgtaagcct

SEQ ID NO: 15061 - RNA, 133 nt, Pseudomonas kirkiae
  source 1..133: mol_type = other RNA; note = Related to QJUQ01000005.1
aggtttatagacagattttttgccatggttcgtggcatttgaaatcattgtgtgggggaatgcttcctcagacttccgcaatctttacgccatgatgactgtctggcggacgcatatgagtgtctataaacct

SEQ ID NO: 15062 - RNA, 133 nt, Pseudomonas sp.
  source 1..133: mol_type = other RNA; note = Related to NZ_CP052862.1
gagcttatagatagattttttgtcatgtttcgtgacatttgcaaatcttgtgtgagtgattgctcatacagttatcagcagtcttggcgccaaagtaaatgtctggcggacgctaatgagtatctataagctc

SEQ ID NO: 15063 - RNA, 136 nt, Pseudomonas fluorescens
  source 1..136: mol_type = other RNA; note = Related to JAGGOG010000003.1
aggcttatagatagatttttggtcgtgtttcgcgatctgtgatacctaatgtcggagtacattgctcctacaattttgcaagctgtttggcgcttcagggttacttgaagtttcgcataagagtatctataagcct

SEQ ID NO: 15064 - RNA, 136 nt, Pseudomonas sp.
  source 1..136: mol_type = other RNA; note = Related to NZ_LT607556.1
aggcttatagatagatttttggtcgtgtttcgcgatctgtgatacctaatgtcggagtacattgctcctacaatttagcaagctgtttggcacttcagggttacttggagtttcgcataagagtatctataagcct

SEQ ID NO: 15065 - RNA, 137 nt, Pseudomonas fluorescens
  source 1..137: mol_type = other RNA; note = Related to NZ_CABVHD010000002.1
aggcttatggatagattttttgtcgtgtttcgcgacatgtgataccaaatgtcggagtacattgctcctgacagactttgcaagcgtgcggttcaaatgggtcgctatgagtttcgcgtaagagtatccataagcct

SEQ ID NO: 15066 - RNA, 137 nt, Pseudomonas viridiflava
  source 1..137: mol_type = other RNA; note = Related to NZ_UTCV01000055.1
aggcttatggatagattttttgtcgtgtttcgcgacatgtgacatcaaatgtcggagtacattgctcctgacagactttgcaagcgggcgcttcagaagggttcccatgagtttcgcgtaagagtatccataagcct

SEQ ID NO: 15067 - RNA, 127 nt, Saccharophagus degradans
  source 1..127: mol_type = other RNA; note = Related to JAHKPP010000027.1
tggcttctaggcagattttgtgttgcgtttcgcaacatttgaaaacaacgtcctaaggaattgccctgtgtgacgcctttcgtcattacgctatgcggtgaaacggcgtaagagtgcctagaagcct

SEQ ID NO: 15068 - RNA, 128 nt, Chromobacterium subtsugae
  source 1..128: mol_type = other RNA; note = Related to NZ_LCWR01000203.1
gggcttgcaaatagatttttttgccatgcttcgtggcaagtgataataatgctgagtggtatagctcagtatctcgttgtattcagtgaatgtatgcgatattccgcataaagagtatttgcaagcct

SEQ ID NO: 15069 - RNA, 129 nt, Chromobacterium violaceum
  source 1..129: mol_type = other RNA; note = Related to CP069442.1
aggcttgcaaatagatttttttaccgcgtatcgtggtaagtgttaataatgctgagtggtatagctcggtatcttgtgtccaatagggtaatcctgtgcaaattaccgcataagagtatttgcaagccg

SEQ ID NO: 15070 - RNA, 147 nt, Ephemeroptericola cinctiostellae
  source 1..147: mol_type = other RNA; note = Related to NZ_CP031124.1
agggctatagatagactttttgacgcgctatcgtgtcatgtgaaaaaaatgttgcacagacttattatgctgcattgtttcaaatttattaatttcattttttagtggttgatctttaactacgcaaacaagagtatctatagccca

SEQ ID NO: 15071 - RNA, 124 nt, Rugamonas sp.
  source 1..124: mol_type = other RNA; note = Related to JAEMNU010000126.1
tggcctataaacagattttttgtcatgattcgtgacaagtatgaataatgtcgctaagtattgccttaatgttcgcccagttgtcctggaatgacgcgctttgcgtaagagtgtttataggcca

SEQ ID NO: 15072 - RNA, 129 nt, Collimonas arenae
  source 1..129: mol_type = other RNA; note = Related to NZ_CP009962.1
gggcttatagatagattttttgtcatgcatcgtgacacgtgaaataaacgttaggcagcattgcctatgaatatacttagcaatatcctagcggtaaacgttaagctgcataggagtatctataggccc

SEQ ID NO: 15073 - RNA, 134 nt, Pseudomonas sp.
  source 1..134: mol_type = other RNA; note = Related to RHQT01000006.1
gggtttataggcagattttttgtcatgcttctgtgacaagtggcaacaatgttgggcgccaatgctcacatatccctcccagagtggtcgactcgattggtcactgtgattcgcgtaagagtgcctataaaccc

SEQ ID NO: 15074 - RNA, 134 nt, Pseudomonas stutzeri
  source 1..134: mol_type = other RNA; note = Related to CP066045.1
gggcttatagacagattttttgtcatgcttctgtgacaagtggcaccaatgttggagtccatcgctctaatagttcttctcagaatggtcatctaaggtcatctctggtaacgcgtaagagtgtctataagccc

SEQ ID NO: 15075 - RNA, 130 nt, Burkholderia cepacia
  source 1..130: mol_type = other RNA; note = Related to JAIZSB010000002.1
ggacttgcggatagattttttgtcatgcttcgtgacacgtgaaataaatggtggagagattgcttatccattatccgctttgcaattactatgcataatgcacctactgcgtaggagtatccgcaggtcc

SEQ ID NO: 15076 - RNA, 129 nt, Burkholderia cenocepacia
  source 1..129: mol_type = other RNA; note = Related to QTSF01000012.1
ggacttgcggatagattttttgtcatgtttcgtgacacgtgaaataaatggtggagagattgctatccattatccgctttgcaattactatgcataatgcacatactgcataggagtatccgcaggtcc

SEQ ID NO: 15077 - RNA, 130 nt, Burkholderia lata
  source 1..130: mol_type = other RNA; note = Related to CABWIJ010000002.1
ggacttgcggatagattttttgtcatgtttcgtgacacgtgaagtaaatggtggagagattgcttatccattatccgtttagcaattactatgcataatgcagtaaccgcataggagtatccgcaggtcc

SEQ ID NO: 15078 - RNA, 126 nt, Methylobacter tundripaludum
  source 1..126: mol_type = other RNA; note = Related to NZ_JMLA01000001.1
gggcttatagacagattttttgtcatgtttcgtgacacgtgaagataaagtttggtgctattgcatccttacgtcccttaggcaattttgggcaatatccctttgcataagagtatctataagccc

SEQ ID NO: 15079 - RNA, 131 nt, Paraburkholderia tuberum
  source 1..131: mol_type = other RNA; note = Related to NZ_FNKX01000001.1
gggcttgtagacagattttttgtcatgtttcgtgacatgtgaaagcaatgttggggttattgctcctcattattcccattatgcaatttcttagcaaattgcagataccgcataggagtgtctgcaagccc

SEQ ID NO: 15080 - RNA, 127 nt, Polynucleobacter wuianus
  source 1..127: mol_type = other RNA; note = Related to JACVPK010000006.1
aggtttgtgggtagattttttgtcatgcatcgtgacaagcgttaacaatgtcgggcttattgccctttacttattccttgcaatttctatgcgaaagctactactgcgtaagagtacccacaaacct

SEQ ID NO: 15081 - RNA, 133 nt, unidentified
  source 1..133: mol_type = other RNA; note = Related to PHCU01000169.1; note = Betaproteobacteria bacterium HGW-Betaproteobacteria-12
gggccgttgggcagagtttttgccgttgattcgcggcatgtgacaacaaagtcagaggctttgcccctgatatccgatccaaatgggattcgctggatgatccctatgatgcttaagagtgcctaacgcgccc

SEQ ID NO: 15082 - RNA, 134 nt, unidentified
  source 1..134: mol_type = other RNA; note = Related to NCCT01000010.1; note = Hydrogenophilales bacterium 12-61-10
gggccgttgggcagagtttttgccgttgtttcgcggcatgtgacaacaatgtcagtggctttgcctcctgatgtccgatgtaaatgggatcagcttaatgatctccgtaatgctaaagagtgcctaacgtgccc

SEQ ID NO: 15083 - RNA, 132 nt, unidentified
  source 1..132: mol_type = other RNA; note = Related to JAGFNH010000001.1; note = Candidatus Accumulibacter sp.
gggccgttgggcagagtttttgccgttgattcgcggcatgtgacaacaaagtcaggggctttgccgcctgatatccgttagatggcccgctgatgtggtccatagtagtgcttaagagtgcctaacgcgccc

SEQ ID NO: 15084 - RNA, 138 nt, unidentified
  source 1..138: mol_type = other RNA; note = Related to JAIQFH010000036.1; note = Acidobacteriia bacterium
gtgcctacagtcagatcttttgctgcgtatcgtggcacgtgacaacaatgtcagatggattgcttgcacgtcgcattgcgcgaccgtatctgactctatcgcactatgtagctatcgcgtaagagtgactgtaggcat

SEQ ID NO: 15085 - RNA, 134 nt, unidentified
  source 1..134: mol_type = other RNA; note = Related to JAIQFA010000126.1; note = Acidobacteriia bacterium
ccgcctacagtcagatcttttgccgcgttatcgtggcacgtgacaacaatgtcagttgctttgctggcacatcgctcgacgctactcgatttgccatcgaactatagctctcgcgtaagagtggctgtaggcat

SEQ ID NO: 15086 - RNA, 139 nt, Pseudomonas aeruginosa
  source 1..139: mol_type = other RNA; note = Related to NRAO01000002.1
gggcttatagcagattttttatcgtgtttcgcgatatgtgacatcaatggtaggcagtattgctatcctcagcggcaacctaacgctatcgacgactcgtggtccacgttagcgttcgcgttatgagtgctataagctc

SEQ ID NO: 15087 - RNA, 133 nt, Pseudomonas sp.
  source 1..133: mol_type = other RNA; note = Related to CP068986.1
gggcttgtagacagatcgttttatcgcgaatcgcgataagtgacatcaacggtggtaggtattgccattacattacttcgcaatctcacgcggagagactcattgacacttgcatatgagtgtctacaagccc

SEQ ID NO: 15088 - RNA, 131 nt, Pseudomonas fragi
  source 1..131: mol_type = other RNA; note = Related to NZ_CP065202.1
gggcttatagacagatcttttatcgcgtatcgcgatatgtgacatcaacggtagtagttgattgctaccgaacgttactgaagtctcaacccgaagactctcggcgtttgcaaatgagtgtctataagccc

SEQ ID NO: 15089 - RNA, 132 nt, Pseudomonas sp.
  source 1..132: mol_type = other RNA; note = Related to JAHUWE010000017.1
gggtttatagacagattttttatcgcgaatcgcgatatgtgacatcaacggtagtatgcattgctacttaacgttactcgaagtctcaaactgaggcacattggcaggttgcaaatgagtgtctataaaccc

SEQ ID NO: 15090 - RNA, 125 nt, Xanthomonas vasicola
  source 1..125: mol_type = other RNA; note = Related to CP028127.1
ggggttgcaggaagatttggttgccgtagtctcgcggcatcagaaacgattgcaaggtgaatttgccgattggcgcgagtgcagcaatacgctcgccatgcgtgcgaaggagttcctgcaacccc

SEQ ID NO: 15091 - RNA, 125 nt, Xanthomonas translucens
  source 1..125: mol_type = other RNA; note = Related to NZ_CP064002.1
ggggttgcaggaagatttggttgccgtcgtttcgcggcatcagaagcaattgcaaggtggatttgccgaatggaccgagtgccgacatacgctcgccatgcgcgcgaaggagttcctgcagcccc

SEQ ID NO: 15092 - RNA, 125 nt, Xanthomonas sp.
  source 1..125: mol_type = other RNA; note = Related to NZ_NSGT01000016.1
ggggttgcaggaagatttggttgccgtagtttcgcggcttcagaaaaaattgcaaggtggatttgccgaatggcgcgagggcagctacgcgctcgcgacgcgtgcgaaggagttcctgcaacccc

SEQ ID NO: 15093 - RNA, 125 nt, Lysobacter capsici
  source 1..125: mol_type = other RNA; note = Related to JAJA02000003.1
ggggctgcaggaagatttggttgccgtagtttcgcggcatcagaaacaattgcagcgtggatttgcctaatggctcgactgcagcgatacgctcgctgtgcgtgccaatgagttcctgcagcccc

SEQ ID NO: 15094 - RNA, 125 nt, Pseudoxanthomonas sp.
  source 1..125: mol_type = other RNA; note = Related to FOAX01000001.1
ggggttgcaggaagatttggttgtcgcgtttcgcggcatcagaaacaattgcaagaaagatttgccggttggcgctgagtgcagctcggcgcgcgctgggcgtgcgaaggagttcctgcaacccc

SEQ ID NO: 15095 - RNA, 124 nt, Luteimonas sp.
  source 1..124: mol_type = other RNA; note = Related to JAIWPR010000054.1
ggggttgcaggaagatttggttgccaccgaatcgtggcatcagaaccaattgcacgatcgatttgccgagtggcgctgagtgcaactgtgcgcgactggctagcgagggagttcctgcaacccc

SEQ ID NO: 15096 - RNA, 126 nt, Xanthomonas vesicatoria
  source 1..126: mol_type = other RNA; note = Related to CP018725.1
ggggttgcaggaagatttggttgccgtcgtatcgcggcatcagaagaaattgcaggatggatttgcccggtggcgctgagtgcagcttggcgctcgcctcgcgtgcgagagagttcctgtaacccc

SEQ ID NO: 15097 - RNA, 126 nt, Lysobacter capsici
  source 1..126: mol_type = other RNA; note = Related to CP011130.1
ggggttgcaggaagatttggttgccgccgaatcgcggcatcagaagcaattgcaagatggatttgcccggtgacgctgagtgcaactcggcgctcgcttggcgtgcgagagagttcctgcaacccc

SEQ ID NO: 15098 - RNA, 126 nt, Pseudoxanthomonas sp.
  source 1..126: mol_type = other RNA; note = Related to JACVAG010000008.1
ggggttgcaggaagatttggtcgccgccgtttcgcggcatcagaaacaattactggatggatttgccccgatggcgcggattgcagcgcagcggtcgcatgttagctaaagagttcctgcaaccct

SEQ ID NO: 15099 - RNA, 129 nt, Lysobacter sp.
  source 1..129: mol_type = other RNA; note = Related to JAHCAU010000005.1
ggggttgcaggaagatttggttgccgacgtttcgcggcatcagaagtcattgtccgctggatttgccccggttagcacgagtgcagcgtatcgcgctcgcatcgcttgcgaaggagttcctgcaaccct

SEQ ID NO: 15100 - RNA, 126 nt, Stenotrophomonas maltophilia
  source 1..126: mol_type = other RNA; note = Related to NZ_CP018756.1
ggggctgcaggtagatccttttgtcgtggtttctgcgacatacgaaacaattgttggttggattgctccgagtggcaccgttgcggcgtccgtcgcgcgcaatagcgagtgagtacctgcagcccc

SEQ ID NO: 15101 - RNA, 125 nt, Paraburkholderia madseniana
  source 1..125: mol_type = other RNA; note = Related to NZ_WVHR01000032.1
ctgtctgcggacagatttgttatcgcgattcgcgataaatggaagtaatgtgcgaaggcgctgccctcgcatctcgtagcggctatctcgccgatgatacgttgccaaagagtgtccgcagacac

SEQ ID NO: 15102 - RNA, 125 nt, Paraburkholderia bryophila
  source 1..125: mol_type = other RNA; note = Related to NZ_QLTK01000030.1
ctgtctgcggacagatttgttatcgcgattcgcgataaatggaagtaatgcgcgaaggcgctgccctcgcatatcgtagcggctatctcgctgatgatacgttgccaaagagtgtccgcagacac

SEQ ID NO: 15103 - RNA, 123 nt, Paraburkholderia sp.
  source 1..123: mol_type = other RNA; note = Related to JAAGPR010000055.1
tcgtctgcggacagatttgttatcgtgtttcgcgataaatggacgtatcgttaggcgacgttgccctcgcatatcgtagcatccgccatgagatgagccttgccatagagtgtccgcagacat

SEQ ID NO: 15104 - RNA, 123 nt, Burkholderia vietnamiensis
  source 1..123: mol_type = other RNA; note = Related to NZ_JZUR01000039.1
cggcctacggacagatttattgtcgtgcttcgcgacaaatggaagtcatgtgggggggtgttgccctcgcctatccttagcatccgctatgaatgatgcgtgccaaagagtgtccgtaggcat

SEQ ID NO: 15105 - RNA, 125 nt, Cupriavidus taiwanensis
  source 1..125: mol_type = other RNA; note = Related to NZ_LT977071.1
gggcctgcggatagatttattgtcgtgtttcgcgacaggtggaagtcatgcaagggaagattgcctttgcgtcaatgtagcaatgtgccgtgaatcgtcgctgccagagagtgtccgtagcgccc

SEQ ID NO: 15106 - RNA, 124 nt, unidentified
  source 1..124: mol_type = other RNA; note = Related to JAFEDJ010000026.1; note = Proteobacteria bacterium
gggcctacggatagatttattgtcgtgcttcgcgacagatggaagtcatgtatgggtagattgcccttgcgtcgtcgtagcaatatgtcggcgatgtagctgccaaagagtatccgtagcgccc

SEQ ID NO: 15107 - RNA, 133 nt, Paracandidimonas sp.
  source 1..133: mol_type = other RNA; note = Related to NZ_JAJJOZ010000002.1
tggcccgtagacagagtttctgccatgtaatcgtggcacttgacaataacgtgaggacctatgctcctcagtccataatgccttacgcgacttgagtgttggcaatatttgcatttgagtgtctacgtggccg

SEQ ID NO: 15108 - RNA, 130 nt, Pusillimonas minor
  source 1..130: mol_type = other RNA; note = Related to NZ_JACJUU010000033.1
ggcctcgtagacagagtttctgccgtgtgatcgtggcacttgacaataatgtgaggagctatgctcctatcaataacgcttagcacgattatagtgttagcaatgtttgcttttgagtgtctacttggcc

SEQ ID NO: 15109 - RNA, 135 nt, unidentified
  source 1..135: mol_type = other RNA; note = Related to JAHJHQ010000474.1; note = Gammaproteobacteria bacterium
ggcctcgtagacagactttctgccatgtgatcgtggcacttgacaaaaatgtgaggacctatgccctcctaccaccatgcggctcatcttttaatgatgctgatcgcgatgtagcaatggagtgtttacggggcc

SEQ ID NO: 15110 - RNA, 137 nt, Paraburkholderia fungorum
  source 1..137: mol_type = other RNA; note = Related to NZ_MCAS01000001.1
ggtctcgcagacagaatttctgccatgtaatcgtggcacttggcaacaatgtgaggacctatgccctcgtatgcacctgacgaggagacgatgacctgtacgatatcgccgcttggcgattgagtgtctgcgaggcc

SEQ ID NO: 15111 - RNA, 136 nt, Paraburkholderia phenazinium
  source 1..136: mol_type = other RNA; note = Related to FSRU01000001.1
ggcttcgcagacagagtttctgccatgtaatcgtggcacttgacaacaaagtgaggacctatgctgctcctcggctactacgcctgacggaactttccgttcatatgatcgatcgcgttggagtgtctgcgaggcc

SEQ ID NO: 15112 - RNA, 135 nt, Burkholderia ubonensis
  source 1..135: mol_type = other RNA; note = Related to NZ_LOVK01000019.1
ggcttcgcggacagagtttctgccatgtaatcgtggcacttgacaacaatgtgaggacctatgctgctcctcggctactacgccggacggaatttccgttcatatgatcgatcgcgttggagtgtccgcgaggcc

SEQ ID NO: 15113 - RNA, 135 nt, Pandoraea anhela
  source 1..135: mol_type = other RNA; note = Related to NZ_CABPSB010000021.1
cgcctcgtagacagaatttctaccatgaatcatggcacttggcaataatgttaggacctatgctgctatcgatatcaaccggattggcgccataacgatgtagcgttcaatgcgcgttggagtgtctacgaggca

SEQ ID NO: 15114 - RNA, 133 nt, Pandoraea pneumonica
  source 1..133: mol_type = other RNA; note = Related to NZ_CABPSK010000001.1
cgcctcgtagacagaatttctgccatgaatcatggcacttgacaacaatgttaggacctatgctgcatcgatatcaacctgattggcgccatgtggagcaggagccaatacgcgttggagtgtctacggggct

SEQ ID NO: 15115 - RNA, 134 nt, Cupriavidus sp.
  source 1..134: mol_type = other RNA; note = Related to NZ_LT984806.1
cgccccgtaggcagaatttctgccatgaatcatggcacttggtaacaaagttaggacctatgctgcatcgatatcaaccgtaatgacgccatgctgagattgcggccaattcgcgttggagtgtctacggggtt

SEQ ID NO: 15116 - RNA, 134 nt, Ralstonia solanacearum
  source 1..134: mol_type = other RNA; note = Related to WSNR01000001.1
tgccccgtagacagaatttctgccatgaatcatggcatttggcaacaatgttaggacctatgctgcatcgggtatcatccgacggacgccatgcgtagctcgtggccaattcgcgatggagtgtctacggggcc

SEQ ID NO: 15117 - RNA, 133 nt, Acidovorax cattleyae
  source 1..133: mol_type = other RNA; note = Related to CP028290.1
ggctccgtagacagactttctgccatgtatcgtggcacttgacaacaacgtgagggcctatgcctcatccttatgaatcgacacagcgtatttgtatgtgacgattggttcgcgtaagagtgtctgcggagcc

SEQ ID NO: 15118 - RNA, 129 nt, Hydrogenophaga sp.
  source 1..129: mol_type = other RNA; note = Related to NZ_JACBGE010000023.1
ggagcctcaggaagaattttttggcctgtatcgggctgagtgaaatcaacgttgggtggattgctcccggcgtatcttccagtattcatcgctgtcaatctgcgatgcctaatgagttcctggggctcc

SEQ ID NO: 15119 - RNA, 129 nt, Variovorax boronicumulans
  source 1..129: mol_type = other RNA; note = Related to MRCN01000005.1
ggacacccaggaagatttttcggcccgcatcgggtcgtgtgaagacaaggtccggcaggttgcccctacgtctatctcatcgcttagcaccttctcatcttacgatgcagaatgagttcctgggtggcc

SEQ ID NO: 15120 - RNA, 133 nt, Achromobacter sp.
  source 1..133: mol_type = other RNA; note = Related to JADCNH010000007.1
ggccccgcaaacagatttttttgtcgtgtttcgcggcaagtgaacgaaatgtttccgggtatgctccatgtcggctaactggttatcgtacagctgatgtatgctcatcaagccaatgagtgtttgtggggcc

SEQ ID NO: 15121 - RNA, 142 nt, Pseudobdellovibrio exovorus
  source 1..142: mol_type = other RNA; note = Related to NC_020813.1
tggtctatgggtagactttgtgctgcggatcgcagcatttgatgaattgtcatcaagtgtcttatttactctacgagtgtctaaccgtatagtctctttcgcttggctttagtgtatgttggtaaagagtacccatagacca

SEQ ID NO: 15122 - RNA, 129 nt, Aliikangiella sp.
  source 1..129: mol_type = other RNA; note = Related to NZ_JADPQF010000006.1
ttgcctaggggtagaattttacatcgcgaatcgcgatgcgagataataatggtaggcagattgccactcgaatagtcattccgatgagctattggtcgcatgagactgcaaaggagtacccctaggttt

SEQ ID NO: 15123 - RNA, 146 nt, Psychrobacter fozii
  source 1..146: mol_type = other RNA; note = Related to NZ_QJSU01000001.1
agacctataaatagattttatcattgtgcttcacaatgagtgattttcaagctactactccttttaagctcatgaggttctatgaggctcttggtttgtcgtagggttcctagtgtattatattgcgaaagagtatttataggtct

SEQ ID NO: 15124 - RNA, 126 nt, Halomonas johnsoniae
  source 1..126: mol_type = other RNA; note = Related to NZ_BMXO01000001.1
ttgcttgcagacagatttttttgtcatgcttcgtgacaggtgaaatcaatgttaggggctttgccatttagcattccttgacggtagcgatgctacctgaacgcgcataagagtgtctgcaagcat

SEQ ID NO: 15125 - RNA, 130 nt, Sulfitobacter aestuariivivens
  source 1..130: mol_type = other RNA; note = Related to NZ_JACTAG010000001.1
tagcttgcggatagatctttccgctgtggttcgcagcgggtgaaaaaattgttcggaggaattgctccttcgtcatctttgcaacattgttggaaatccgtgggtttgctcaacgagtatccgcaagcga

SEQ ID NO: 15126 - RNA, 128 nt, Methylobacterium gossipiicola
  source 1..128: mol_type = other RNA; note = Related to NZ_FOPM01000016.1
aggcttgcaggcagattcgttgttatgtttcgtaacaagtaatataaatggcgggggcatcgccttcgcgactcgtgatcctggtgaccttgactgtcatcctgcgcatagagagtgcctgcaagctt

SEQ ID NO: 15127 - RNA, 129 nt, Methylobacterium sp.
  source 1..129: mol_type = other RNA; note = Related to JAKSXV010000098.1
gggcttgtaggcagattcgttgctatgtttcgtagcaagtaacataaatggcgggggcatcgcctccgtgactcgtggcttcgatgaccttcgactgtcatcctgtgcatagagagtgcctacaagccc

SEQ ID NO: 15128 - RNA, 128 nt, Aureimonas flava
  source 1..128: mol_type = other RNA; note = Related to QYRN01000007.1
cggtttacaggcagatccgttgttgtgtttcgcaacaagtaacataaaagtctcccgcattgcctcagcatctggcgatcacgacgggtcgatgggtcctggggtgcatagagagtgcctgtaaaccg

SEQ ID NO: 15129 - RNA, 136 nt, Treponema sp.
  source 1..136: mol_type = other RNA; note = Related to JAFUJV010000004.1
tgccctataagtagattttattattgtgtttcgcaatatttgaagaaaatactgcatgaggtttctcggctattttcgttctatgtttcagattagacagacagaagatctatcgccaaagagtacttatagggct

SEQ ID NO: 15130 - RNA, 127 nt, Salmonella bongori
  source 1..127: mol_type = other RNA; note = Related to AANPCH010000002.1
gggcctatagatagattttgtatcatgtttcgtgatatgtgaaaaaaatgttagaggcaacgccctaagtatgctttacgccagaggtaaatgcctcacgctatgctaaagagtttctatagtgccc

SEQ ID NO: 15131 - RNA, 127 nt, Salmonella enterica
  source 1..127: mol_type = other RNA; note = Related to CP074306.1
gggcctatagatagattttgtatcatgtttcgtgatatgtggaaaaaatgttagaggcaacgcccctagtatgctttacgccagagggaaatacctcacgctgtgctaaagagtttctatagtgccc

SEQ ID NO: 15132 - RNA, 125 nt, Dickeya aquatica
  source 1..125: mol_type = other RNA; note = Related to NZ_LT615367.1
gggcctatagaaagattttgtatcatgtttcgtgatatgtgaaaaaaaagttagaggcaacgccttaagtatgctcggtcatgaggaactacctcacgccctgctaaagagtttctatagtgccc

SEQ ID NO: 15133 - RNA, 141 nt, Erwinia rhapontici
  source 1..141: mol_type = other RNA; note = Related to JAGGMP010000001.1
gtgcccatagttagattttgtgtcatgtttcatgacaagtgaaaagaacgttggagccaacgctccttgaagtatccttaaagagtaacatggatagccgccaagttactcgtcgaatcgcgtaagagtaactatgggcac

SEQ ID NO: 15134 - RNA, 139 nt, Cronobacter malonaticus
  source 1..139: mol_type = other RNA; note = Related to NZ_NRNL01000028.1
ctgcccatagttagattttgtgtcatgtttcgtgacaagtgaaaacaaggttggagccaacgctccctgaatatccttactgagtgacacggatttccgccagtcccccagccaatcgcgtaagagtaactatgggcac

SEQ ID NO: 15135 - RNA, 140 nt, Pantoea sp.
  source 1..140: mol_type = other RNA; note = Related to SZZV01000010.1
tcgcccacagttagattttgtgtcatgtttcgtgacaagtgataacaacgttggagccaacgctgctctaatggcgtcaaagaggtacagggggaaacgctaagttgctcccaatatcgcataagagtaactgtgggcac

SEQ ID NO: 15136 - RNA, 129 nt, Rahnella variigena
  source 1..129: mol_type = other RNA; note = Related to NSDJ01000002.1
tggtctataaacagattttgtgtcgcgtatcgcgataagtgaaagtaaggttggagacaaccgccgcgttgaaataatatggccaccggtgggtcgccgtatgagtgcgataagagtgtttatagaccc

SEQ ID NO: 15137 - RNA, 130 nt, Pectobacterium versatile
  source 1..130: mol_type = other RNA; note = Related to NZ_CAKLIS010000018.1
tggtctataaacagattttgtgtcgcgaatcgcgataagtgaaaaaaaggttggagacaaccgccccattgaaaacgtgacggcaccgccagtgtgcatactcgaatgcgttaagagtgtttatagacca

SEQ ID NO: 15138 - RNA, 135 nt, Pantoea coffeiphila
  source 1..135: mol_type = other RNA; note = Related to NZ_JAFBFW010000001.1
tggtttatgggcagattttgggtcgcgtttcgcgatcagtgaaaaaaatgtccggtaggattgccctttcaggaactcattgtcctggcgcttcttaggttcttgtcaagtttgcgtaagagtgcccataaacct

SEQ ID NO: 15139 - RNA, 134 nt, Raoultella ornithinolytica
  source 1..134: mol_type = other RNA; note = Related to AP025009.1
cggtttatgggcagattttgggtcgcgtttcgcgatcagtgaaaaaaatgtccgataggattgcctttcaggaactcattgtcctggcgtttcttgaattcttgtcaagtttgcgtaagagtgcccataaacca

SEQ ID NO: 15140 - RNA, 134 nt, Erwinia sp.
  source 1..134: mol_type = other RNA; note = Related to LMLK01000003.1
tggtttatgggcagattttggatcgcgtttcgcgatcagtgaaaaaaatgtccgattggattgcctctcagggtctcactttcctggctttacctgacttcttgtcaagtttgcgtaagagtgcccataaacca

SEQ ID NO: 15141 - RNA, 135 nt, Yersinia ruckeri
  source 1..135: mol_type = other RNA; note = Related to CP071802.1
tggtttatgggcagattttggatcgcgtttcgcgatcagtgaaaaaaatgtccgataggattgcctttcagggtctcacgttctccgcgctactcgaggttcttgtcaagtttgcgtaagagtgcccataaacca

SEQ ID NO: 15142 - RNA, 135 nt, Escherichia coli
  source 1..135: mol_type = other RNA; note = Related to NZ_CP080146.1
tggtttatgggcagattttgggtcgcgtttcgcgatcagtgaaaaaaatgtccgataggattgcctttcaggatctcatgttcctcgcatttcttaaggttcttgtcaagtttgcgtaagagtgcccataaaccc

SEQ ID NO: 15143 - RNA, 135 nt, Rahnella inusitata
  source 1..135: mol_type = other RNA; note = Related to NZ_CP065024.1
tggtttatgggcagattttggatcgcgtttcgcgatcagtgaaaaaaatgtccaataggattgcctttcaggggctcacgttcctggcgttactcgacggtcttgtcaagtttgcgtaagagtgcccataaacca

SEQ ID NO: 15144 - RNA, 136 nt, Vibrio parahaemolyticus
  source 1..136: mol_type = other RNA; note = Related to LQCW01000011.1
tggtttatgggcagattttggttcgcgtttcgcgatcagtgaaaaaaatgtccgactggattgcctttcaggttctcacgtttccggacgctcttttaacttcttgtcaagtttgcgtaggagtgcccataaacca

SEQ ID NO: 15145 - RNA, 137 nt, Vibrio cholerae
  source 1..137: mol_type = other RNA; note = Related to KB662759.1
cggtttatgggcagattttgggtcgcgtttcgcgatcagtgaaaaaaatgtccgataggattgccttttcaggttctcatgtttccggatgctcttttaacttcttgtcaagtttgcgtaggagtgcccataaacca

SEQ ID NO: 15146 - RNA, 135 nt, Vibrio parahaemolyticus
  source 1..135: mol_type = other RNA; note = Related to JACBSO010000017.1
cggtttatgggcagactttgggtcgcgtttcgcgatcagtgaaaaaaatgtccgagtggtttgccttgtgtagctcattgtaccggatgctctttgaacttcttgtcaagtttgcgtaggagtgcccataaacca

SEQ ID NO: 15147 - RNA, 134 nt, Aeromonas sp.
  source 1..134: mol_type = other RNA; note = Related to JAKZFL010000005.1
aggtttatgggcagatattggatcgcgcttcgcgatcagtgaaaaaaacgtccgaaaggattgcccgaaggtatcacgttgtcagacgctctccgtagttcttgtcacgtttgcgtaggagtgcccataaacca

SEQ ID NO: 15148 - RNA, 134 nt, Aeromonas salmonicida
  source 1..134: mol_type = other RNA; note = Related to QLLM01000001.1
tggtttatgggcagatttttgatcgcgcttcgcgattagtgaaaacaatgtccgaaaggattgccattttgatatcaaattgtcagagctctccgtagttcttgtcaagtttgcgtaggagtgcccataaacca

SEQ ID NO: 15149 - RNA, 134 nt, Vibrio diazotrophicus
  source 1..134: mol_type = other RNA; note = Related to POSH01000027.1
tggtttatgggcagattttggatcgcgtttcgcgatcagtgaaaataatgtccgattggattgccctttttgataacgattgctcaatgctttttgacgtcttgtcaagtttgcgaaggagtgcccataaacca

SEQ ID NO: 15150 - RNA, 134 nt, Photobacterium carnosum
  source 1..134: mol_type = other RNA; note = Related to WMDE01000004.1
tggtttatgggcagatttggatcgcgcttcgcgatcagtgaaaaaaatgtccgagtggattgcctttaaagtatcatattttctgattctttctgaacttcttgtcaagtttgcgtaggagtgcccataaacct

SEQ ID NO: 15151 - RNA, 135 nt, Oceanimonas baumannii
  source 1..135: mol_type = other RNA; note = Related to NZ_SODO01000007.1
cggtttatgggcagattttggatcgcgcttcgcgatcagtgaaaaaaatgtccgataggattgcctttaaggtttcatattttctgatgcctttttaacgtaatgtcaagtttgcgtaggagtgcccataaacca

SEQ ID NO: 15152 - RNA, 130 nt, Rheinheimera pacifica
  source 1..130: mol_type = other RNA; note = Related to NZ_FNXF01000003.1
cggtttatgggcagattttggattgcgtttcgcaatcagtgaaaaaaatgtccgaaaggattgcctctacaatgatatgtacaccatgtctgacaatctcttgtcaacgcgaaggagtgcccataaacca

SEQ ID NO: 15153 - RNA, 131 nt, Thalassomonas viridans
  source 1..131: mol_type = other RNA; note = Related to NZ_JYNJ01000140.1
cggtttatgggcaggttttggatcgcgcttcgcgatcagtgaaaaaaatgtccgaaaggattgccttttaggagacgatttatacggttcctaatgttccctcaggagtgcataagagtgcccataaaccc

SEQ ID NO: 15154 - RNA, 125 nt, Marinobacter daepoensis
  source 1..125: mol_type = other RNA; note = Related to JAHVIP010000004.1
aggcttgtgggcagattttgggttgcgattcgcgacttgtgatgacaatgtcctgccgtttgcactcggacgacctttacgtgctctgcagaggacttgaatagcgtaggagtgcccacaagccg

SEQ ID NO: 15155 - RNA, 129 nt, Marinobacter halotolerans
  source 1..129: mol_type = other RNA; note = Related to NZ_VMHP01000002.1
tggcttatgggcagattttgggtcgcgcttcgcgatctgtgaaaacattgcccgaagggattgcaccttatggacgatctcacgtgtcacattgacgttctgactgagcgaaagagtgcccataagcca

SEQ ID NO: 15156 - RNA, 129 nt, Hahella sp.
  source 1..129: mol_type = other RNA; note = Related to JAHMIN010000032.1
gggcttatgggcagattttgggtcgcgattcgcgatctgtgaaaacaatgtccgagagaattgctcttgacaggcttttacacgtgactgaatagtacttggtctgtgcgtaagagtgcccataagcct

SEQ ID NO: 15157 - RNA, 128 nt, Pseudoalteromonas sp.
  source 1..128: mol_type = other RNA; note = Related to CP091442.1
tagcttacgggcagatttttgttcgcgcttcgcgaacagtgaaaaaaatgttcgaacggaccgcctatgaggaaatgtatcatcactttaaggtacttctcgacacgcgtaagagtgcccgtaagcta

SEQ ID NO: 15158 - RNA, 128 nt, Alteromonas sp.
  source 1..128: mol_type = other RNA; note = Related to BLIJ01000065.1
cggcttatgggcagatattgggtcgcgcttcgcggccagtgataaaattgttagaggggattgccctcaaatttccttgtgacgtctttaagtacctgatgtccgagcgtaggagtgcccataagcca

SEQ ID NO: 15159 - RNA, 125 nt, Vibrio natriegens
  source 1..125: mol_type = other RNA; note = Related to NZ_CP016347.1
cagcttatgggcagattttttgttcgcgtttcgcgaacagtgaaaaaatggtccgttcggattgcctgataatcgtattcatgtaggtatttaaatacatagtgcctaggagtgcccataagctc

SEQ ID NO: 15160 - RNA, 127 nt, Marinobacter sp.
  source 1..127: mol_type = other RNA; note = Related to AAXY01000057.1
tggcttatgggcagatttttagttcgcgtttcgcgatcagtgaaaaaattgtccgtacggattgccttgtatgtatattcatatgtttatatatgattatatggtgcctaggagtgcccataagcca

SEQ ID NO: 15161 - RNA, 126 nt, Vibrio nigripulchritudo
  source 1..126: mol_type = other RNA; note = Related to JXXT01000002.1
cggcttatgggcagatttttagctcgagtttcgcgagcagtgaaaaaaacgtccgaacggattgccgagtagaatatttcgtatcaaatgtatgagactatagtgcgtaggagtgcccataagccg

SEQ ID NO: 15162 - RNA, 128 nt, Vibrio cidicii
  source 1..128: mol_type = other RNA; note = Related to NZ_CP046804.1
cggcttatgggcagatttttagttcgcgtttcgcgatcagtgaagaaatggtccgttcggattgccttatatagtatatcatataggtatttataggatatatagtgcgtaggagtgcccataagcca

SEQ ID NO: 15163 - RNA, 128 nt, unidentified
  source 1..128: mol_type = other RNA; note = Related to AAVS01000020.1; note = Alteromonadales bacterium TW-7
cggtttatgggcagatttttagttcgcgcttcgcgaacagtgaaaaaattgtccgttcggattgccttataagtgtatctatatgtaaatttatgggatatatagtgcgtaggagtgcccataaacca

SEQ ID NO: 15164 - RNA, 129 nt, Photobacterium angustum
  source 1..129: mol_type = other RNA; note = Related to PYOV01000005.1
cggcttatgggcagattttttgttcgcgtttcgcgaattgtgaaaaaattgtccgttcggattgcctcgaataaatagttacacaggtattgccagatatacacaatgcctaggagtgcccataagcca

SEQ ID NO: 15165 - RNA, 126 nt, Aeromonas veronii
  source 1..126: mol_type = other RNA; note = Related to NZ_CP024930.1
cggcttatgggcagattattagctcgcgcttcgcgagcagtgaaaaaattgtccacttggattgccctattatagtgtgtcgatgtgcatgctgagcatatagtgcgtaagagtgcccataagcct

SEQ ID NO: 15166 - RNA, 126 nt, Aeromonas sp.
  source 1..126: mol_type = other RNA; note = Related to JAHUWA010000001.1
cggcttatgggcagattcttcgctcgcgcttcgcgagcagtgaaaaaatggtccgttcggattgccctattgtagtgtatcaatgtgctagacgatattatagtgcataggagtgcccataggcca

SEQ ID NO: 15167 - RNA, 127 nt, Plesiomonas shigelloides
  source 1..127: mol_type = other RNA; note = Related to NZ_MUNJ01000002.1
aggcttatgggcagatttttgctcgcgattcgcgagttgtgaaaccattatccgtctggattgctcataatgtatcatatcgtacgccacgatgaatcttattacgcgtaagagtgcccataagcct

SEQ ID NO: 15168 - RNA, 126 nt, Pseudomonas sp.
  source 1..126: mol_type = other RNA; note = Related to DOLN01000112.1
cggcttatgggcagatttttagctcgcgtttcgcgagtagtgatgatgttgtcggtacggattgcttatgtagtatgtccatagtgttacatgaatggaccagtgcctaggagtgcccataagcca

SEQ ID NO: 15169 - RNA, 127 nt, Colwellia sp.
  source 1..127: mol_type = other RNA; note = Related to JABSPA010000005.1
tggtttatgggcagatttttcgttcgcgtttcgcgaacagtgaaacaatgatccgtcaggattgcatcatgtagtatttcgaagttgtatcttcagtatgttagtgccaaggagtgcccataagcca

SEQ ID NO: 15170 - RNA, 127 nt, Shewanella sp.
  source 1..127: mol_type = other RNA; note = Related to NZ_CP048031.1
cggcttatgggcagatttttggttcgcgtttcgcgagcggtgaaacaattgtccgaaaggattgccatattgaagtttgcacgtatcaaatgtcagcataatggtgcataagagtgcccataagcca

SEQ ID NO: 15171 - RNA, 125 nt, Shewanella sp.
  source 1..125: mol_type = other RNA; note = Related to JAHKRD010000030.1
cggcttatgggcagatttttagttcgcgtttcgcgaacagtgaaaaaatcgtccgttaggattgcataataaatgttatcgctgcttatcgccatgatacagtgcgtaagagtgcccataagcca

SEQ ID NO: 15172 - RNA, 126 nt, Pseudoalteromonas fuliginea
  source 1..126: mol_type = other RNA; note = Related to NZ_SEUL01000049.1
cggcttatgggcagatttttagttcgcgcttcgcgaacagtgaaacaattatccgtctggattgcatcttatagtttctcatagttgcttccgtatataataatgcctaggagtgcccataagcca

SEQ ID NO: 15173 - RNA, 129 nt, Pseudoalteromonas espejiana
  source 1..129: mol_type = other RNA; note = Related to NZ_CP011029.1
tggtttatgggcagatttttggtcgcgtttcgcgacctgtgaaaaaattgttcgagagaactgcctattagtagattatcatcattatgaggctacctgagaaaagtgcctaggagtgcccataaacca

SEQ ID NO: 15174 - RNA, 131 nt, Pseudoalteromonas prydzensis
  source 1..131: mol_type = other RNA; note = Related to NZ_RRZA01000072.1
cggtttatgggcagatttttggtcgcgcttcgcgacttgtgaaacaatcgttcgagagaactgcctactagtagattatcgtacttttcgaagtctatcagattaaagtgcctaggagtgcccataaaccg

SEQ ID NO: 15175 - RNA, 123 nt, Marinomonas spartinae
  source 1..123: mol_type = other RNA; note = Related to JAEMUI010000038.1
tggcttatggatagatttttgttcgcgcatcgcgaacagtggaacaattgtccgttaggattgccttatagtattatcaatgtccttataatacttatagcgcgtaagagtatccataagcca

SEQ ID NO: 15176 - RNA, 131 nt, Photobacterium damselae
  source 1..131: mol_type = other RNA; note = Related to NZ_UATK01000001.1
tggtttatgggcagattttggatcgcgtatcgcgatcggtgaaaacaatgtccgaaaggattgccctttgtgaatgatgtttcaaatgtctgaatgtccttactagagtgcgtaagagtgcccataaaccg

SEQ ID NO: 15177 - RNA, 131 nt, Pseudoalteromonas sp.
  source 1..131: mol_type = other RNA; note = Related to NZ_CP012737.1
tggtttatgggcagattttgggtcgcgtttcgcgatcagtgaaaaaaatgtcgttgacattacctttatgatgattagctgtactttatgatcattactattgttaaatgtgtaggagtgcccataaacca

SEQ ID NO: 15178 - RNA, 128 nt, Moritella marina
  source 1..128: mol_type = other RNA; note = Related to CP044399.1
cagcttatgggcagatttagatcgcgtttcgcgatccgtgaaaacaatgtcgaaagatattgcctactattgaacggttttgacggttctaataggatctattggtgcataggagtgcccataagcta

SEQ ID NO: 15179 - RNA, 127 nt, Halomonas sp.
  source 1..127: mol_type = other RNA; note = Related to JAFWFN010000035.1
tggcttatgggcagattttgggtcgcgtatcgcgatcagtgaaaagaatgtccggcaggaatgcatctttagagtgttacacttgacgctaggttgaccttacatgcgtaggggtgcccataagcca

SEQ ID NO: 15180 - RNA, 123 nt, Pseudomonas syringae
  source 1..123: mol_type = other RNA; note = Related to GL385078.1
cggcttatgggcagatttttggatcgcggatcgcgatcagtgggaaaaatgttcgaaaggctgcctgatgagacctgtcgctacttgacggtccctactgtgcgtaggagtgcccataagcct

SEQ ID NO: 15181 - RNA, 123 nt, Pseudomonas amygdali
  source 1..123: mol_type = other RNA; note = Related to CP089282.1
cggcttatgggcagatttttggatcgcggatcgcgatcagtgggaaaaatgttcgagatgctgcctgttgagacttgtcgctggttgacggtccctactgtgcgtaggagtgcccataagcct

SEQ ID NO: 15182 - RNA, 125 nt, Pseudomonas amygdali
  source 1..125: mol_type = other RNA; note = Related to GL384649.1
tggcttatgggcagatttttgggtcgcggatcgcgaccagtggaaacaatgtccgaaagggctgccttatgagacttgtcgatccttgacggtccctccagttgcgtaggagtgcccataagcca

SEQ ID NO: 15183 - RNA, 125 nt, Pseudomonas viridiflava
  source 1..125: mol_type = other RNA; note = Related to NZ_UTBG01000001.1
tggcttatgggcagattttttgatcgcggatcgcgatctgtggaaacaacgtccgaaagggctgccttatgagacttgtcgcaccttgacggtccttccagtagcgaaggagtgcccataagcca

SEQ ID NO: 15184 - RNA, 125 nt, Pseudomonas sp.
  source 1..125: mol_type = other RNA; note = Related to WIBD01000035.1
tggcttatgggcagatttttggatcgcggatcgcgatcagttaaaacaatgtccgaaagggctgccttatgagacttgtcgacccttgacggtccctccacttgcgtaggagtgcccataagcca

SEQ ID NO: 15185 - RNA, 125 nt, Pseudomonas chlororaphis
  source 1..125: mol_type = other RNA; note = Related to NZ_LHVB01000014.1
cggcttatgggcagatttatggatcgcggatcgcgatcagtgggaaaaacgtccgaaaggattgccttatgagacttgtcgacacttgacggtccctccgtttgcgtaggagtgcccataagcca

SEQ ID NO: 15186 - RNA, 125 nt, Pseudomonas mangiferae
  source 1..125: mol_type = other RNA; note = Related to NZ_VJOY01000005.1
tggcttatgggcagattttggatcgcggatcgcgatcagtgaaaacaatgtccgaatggactgccctatgagacttgtcgactctcgacggtccctcaagtttgcgaaggagtgcccataagcca

SEQ ID NO: 15187 - RNA, 125 nt, Pseudomonas stutzeri
  source 1..125: mol_type = other RNA; note = Related to NZ_JYHV01000007.1
tggcttatgggcagattttggatcgcggatcgcgatcagtgaaaacaatgtccgaaaggactgcccgatgagacttgtcgacttttgacggtccctccagtttgcgtaggagtgcccataagcca

SEQ ID NO: 15188 - RNA, 125 nt, Pseudomonas syringae
  source 1..125: mol_type = other RNA; note = Related to NZ_AVEF02000221.1
tggcttatgggcagattttggatcgcggatcgcgatcagtgacaacaatgtccgaaaggactgccctatgagacttgtcgactcttgacggtccctccaatttgcgtaggagtgcccataagcca

SEQ ID NO: 15189 - RNA, 124 nt, Pseudomonas sp.
  source 1..124: mol_type = other RNA; note = Related to QLTL01000007.1
aggcttatgggcagattttggatcgcggatcgcgatcagtgaaaacaatgtccgaaaggactgccctatgagacttgtcgacgtttgacggtccctccagttgcgtaggagtgcccataagccg

SEQ ID NO: 15190 - RNA, 125 nt, Pseudomonas putida
  source 1..125: mol_type = other RNA; note = Related to NZ_CP018743.1
aggcttatgggcagattttggatcgcggatcgcgatcagtggaaaaaacgtccgaaaggactgccttatgagacttgtcgacttttgacggtccctccagtttgcgtaggagtgcccataagcca

SEQ ID NO: 15191 - RNA, 126 nt, Pseudomonas sp.
  source 1..126: mol_type = other RNA; note = Related to NZ_JZRI01000162.1
tggcttatgggcagattttggatcgcggatcgcgatcagtggtaacaatgtccgaaagactgctcctatgaggctcctctctgcttaagagtccctccaagtttgcgaaggagtgcccataagcca

SEQ ID NO: 15192 - RNA, 124 nt, Aeromonas veronii
  source 1..124: mol_type = other RNA; note = Related to JAGDEY010000009.1
cggcttatgggcagattttggatcgcggatcgcgatcagtgaaaataatgtccggaaggacttgcctttgcgacttggcgagtcgcgctacacgagatgagtgcgtaggagtgcccataagcca

SEQ ID NO: 15193 - RNA, 125 nt, Aeromonas allosaccharophila
  source 1..125: mol_type = other RNA; note = Related to NZ_UETN01000024.1
cggcttatgggcagattttgggtcgcggatcgcgatcagtgaaaacaatgtccgaaaggacttgccttgtgcgacttggcgagtcgctatgctcgaaatgagtgcgaaggagtgcccataagcca

SEQ ID NO: 15194 - RNA, 126 nt, Pseudomonas sp.
  source 1..126: mol_type = other RNA; note = Related to JACAQA010000043.1
tggcttatgggcagattttggatcgcgtatcgcgatcagtggaaaaattgtccgaaaggattgccccctatgagacttgtcgcttcttgacagtccctacagtagcgtaagagtgcccataagcca

SEQ ID NO: 15195 - RNA, 124 nt, Pseudomonas sp.
  source 1..124: mol_type = other RNA; note = Related to POEK01000001.1
tggcttatgggcagattttggatcgcgaatcgcgatcagtgggaaaaatgttggaatgctttgcccggtgagaattgtcatgtcttgaggttctctacgtttgcgaaagagtgcccataagcct

SEQ ID NO: 15196 - RNA, 127 nt, Pseudomonas mediterranea
  source 1..127: mol_type = other RNA; note = Related to NZ_LT629790.1
cggcttacgggcagattttggatcgcgcatcgcgatcagtgaaaaaattgtccgaaaggattgcccttgtagtgacttgtcgattcttgacggtcctggcacagtgcgtaggagtgcccgtaagccc

SEQ ID NO: 15197 - RNA, 127 nt, Pseudomonas monteilii
  source 1..127: mol_type = other RNA; note = Related to JAJSQA010000022.1
cggcttacgggcagattttggatcgcgcatcgcgatcagtgaaaaaattgtccgaaaggattgcccttgtggtgacttgtcgcttcttgacggtcctggcagagtgcgtaggagtgcccgtaagccc

SEQ ID NO: 15198 - RNA, 127 nt, Pseudomonas savastanoi
  source 1..127: mol_type = other RNA; note = Related to NZ_CP076652.1
cggcttacgggcagattttggatcgcgcatcgcgatcagtgaaaaaattgtccgaaaggattgcccttgtggtgacttgtcgcttcttgacggtcctggcacagtgcgtaggagtgcccgtaagcca

SEQ ID NO: 15199 - RNA, 125 nt, Pseudomonas botevensis
  source 1..125: mol_type = other RNA; note = Related to NZ_JAHTKI010000003.1
cggtttacgggcagattttgggtcgcgcatcgcgatcagtgaaaaaattatccgaaaggattgcccttgagatgacttagcgattcttcgcggtcctggtaatgcgtaagagtgcccgtaagcca

SEQ ID NO: 15200 - RNA, 125 nt, Pseudomonas sp.
  source 1..125: mol_type = other RNA; note = Related to NZ_LN854573.1
cggcttacgggcagattttgggtcgcgtatcgcgaccagtgaaaccattgtccgaaaggattgcccttgtggagacttgtcgattcttgacggtcctggcggtgcgtaggagtgcccgtaagcca

SEQ ID NO: 15201 - RNA, 126 nt, Pseudomonas duriflava
  source 1..126: mol_type = other RNA; note = Related to NZ_VLKY01000029.1
cggcttacgggcagattttgggtcgcgcatcgcgatcagtgaaaaaatggtccgaaaggattgcccttggtggagactcatcgattctctacggtcctggcagtgcctaggagtgcccgtaagccg

SEQ ID NO: 15202 - RNA, 126 nt, Pseudomonas oryzihabitans
  source 1..126: mol_type = other RNA; note = Related to NZ_CP044074.1
tggcttacgggcagattttgggtcgcgtatcgcgatcagtgaaaaaatggtccgaaaggattgccctttgtggagacttgtcgattctctacggtcctggctgtgcctaggagtgcccgtaagcca

SEQ ID NO: 15203 - RNA, 128 nt, Halomonas endophytica
  source 1..128: mol_type = other RNA; note = Related to NZ_PNRF01000034.1
tggcttatgggtagattttggatcgcgtatcgcgatcagtgaaaaaattgtccgaatggattgccctttgaacaatatgtcatatcttaaatgttccttgacgtttgcaaaagagtacccataagcca

SEQ ID NO: 15204 - RNA, 128 nt, Thiothrix sp.
  source 1..128: mol_type = other RNA; note = Related to QOAT01000087.1
cggcttatgggcagattttgggtcgcgaatcgcgatcagtgaaaataatgtccatttggattgcctttaatggtgactatgcgtatcaagtatgatccattgcagtgcgaaagagtgcccataagcca

SEQ ID NO: 15205 - RNA, 128 nt, unidentified
  source 1..128: mol_type = other RNA; note = Related to JAHJJI010000033.1; note = Gammaproteobacteria bacterium
tggcttatgggcagattttgggtcgcgcatcgcgatcagtgaaaaaaatgtccgtctggattgcccttaacagtgattatgcttactcgataatctcattgacagtgcaaaagagtgcccataagcct

SEQ ID NO: 15206 - RNA, 128 nt, unidentified
  source 1..128: mol_type = other RNA; note = Related to NVWS02000073.1; note = Zetaproteobacteria bacterium
cggcttatgggcagattttgggtcgcggatcgcgatcagtgaaaacaatgtccgaaaggattgcctacggaagtgatatacgcaacttaatatcctccatgctggtgcgtaagagtgcccataagcca

SEQ ID NO: 15207 - RNA, 129 nt, unidentified
  source 1..129: mol_type = other RNA; note = Related to NZ_BDMN01000304.1
cggcttataggcagattttgggtcgtgtatcgcgaccagtgaaaaaaatatccggacggattgccccttaaaagttctctacagattaactagagaatacgtattacgcataagagtgcctataagcca

SEQ ID NO: 15208 - RNA, 128 nt, Marinobacter salinexigens
  source 1..128: mol_type = other RNA; note = Related to NZ_VTUU01000001.1
tggcttatgggcagattttggatcgcggatcgcgatcagtggaaaaaatgtcccagtacattgcccttaagattgcgtctcgtaatgctgcagtctcccccagggtgcgtaggagtgcccataagcca

SEQ ID NO: 15209 - RNA, 127 nt, Aeromonas dhakensis
  source 1..127: mol_type = other RNA; note = Related to NZ_CP045311.1
tggcttatgggcagatttttgactttgtttcggagtctgtgaaaaaaatgtccgctggactgccccctaagcgatatcaccgccacgccgagatgtcgcgcgcttgcgtaggagtgcccataagcca

SEQ ID NO: 15210 - RNA, 127 nt, Aeromonas veronii
  source 1..127: mol_type = other RNA; note = Related to NZ_CP012504.1
tggcttatgggcagatttttgactttgtttcggagtctgtgaaaataatgtccgctggactgccccctaagcgatatcagcaccacgctgagatgtcgcgcgcttgcgtaggagtgcccataagcca

SEQ ID NO: 15211 - RNA, 131 nt, unidentified
  source 1..131: mol_type = other RNA; note = Related to JABXIW010000056.1; note = Gammaproteobacteria bacterium
aggtttatgggcagattttgggtcgcgtatcgcgatcagtgaaaagaatgtccgataggattgcctatagtaacgatatgactaatcatttatagtcatttgcataacagcgtaagagtgcccataaatct

SEQ ID NO: 15212 - RNA, 129 nt, Aliivibrio fischeri
  source 1..129: mol_type = other RNA; note = Related to WOBJ01000032.1
cagcttacgggcagattttgggttgcgcatcgcaatcagtgaaaaaaatgtctgagagactcgcctttaatgtgatattacgtttcttcttaatatccctgactagtgcataggagtgcccgtaagcta

SEQ ID NO: 15213 - RNA, 128 nt, Vibrio plantisponsor
  source 1..128: mol_type = other RNA; note = Related to NZ_JABEQC010000006.1
tagcttacgggcagattttgggttgcgtatctgcaatcagtgaaaaaaatgtcctagagacttgctttttggcgattatgctaatttttgataatccctgactagtgcgtaagagtgcccgtaagcta

SEQ ID NO: 15214 - RNA, 128 nt, Vibrio echinoideorum
  source 1..128: mol_type = other RNA; note = Related to NZ_SMJS01000006.1
tagcttacgggcagattttgggtggcgtatcgccatcagtgaaaacaacgtctgatagacttgcctttataatgtaatgttcagtttctctatgatcctcgacatggcataggagtgcccgtaagcga

SEQ ID NO: 15215 - RNA, 125 nt, Shewanella baltica
  source 1..125: mol_type = other RNA; note = Related to NZ_CP028355.1
tagcttacgggcagattttgggttgcgtatcgcaatcagtgaaaaaaatgtctgatagactcgccttatgaatagttacattacttctaatgtctctgactatgcgaaggagtgcccgtaagcta

SEQ ID NO: 15216 - RNA, 129 nt, Vibrio jasicida
  source 1..129: mol_type = other RNA; note = Related to NZ_CAJFAE010000018.1
aagcttacgggcagattatgggttgcgaatcgcaatcagtgaaaaaaatgtccgagagactagcctttatcagggatgttacgtttcttgttctatccttgaccagtgcataagagtgcccgtaagcta

SEQ ID NO: 15217 - RNA, 128 nt, Photobacterium carnosum
  source 1..128: mol_type = other RNA; note = Related to WMDE01000033.1
ttgcttacgggcagattttgggttgcgtatcgcaatcagtggaaaaaatgtcctagagactagcccttaactggaatttacgattcttctcgtatccttgtccagcgcataagagtgcccgtaagctc

SEQ ID NO: 15218 - RNA, 126 nt, Vibrio parahaemolyticus
  source 1..126: mol_type = other RNA; note = Related to CP040103.1
tggtttgcgggtagatcttgggttgcgtatcgcaatcagtgaaaacaatgtcgccaagactagccctttaacgatttgacggattctttccgattcacctcggtgcgaaagagtacccgcaaacca

SEQ ID NO: 15219 - RNA, 127 nt, Amphritea pacifica
  source 1..127: mol_type = other RNA; note = Related to NZ_JAFFZP010000001.1
gggcctattggcagattttttggctgcgattcgcagtctgtgacaacaatgtctgaatctctcgccttcgcagttgaatggatcactatgtgactgcagcaatgagcgtaagagtgccaataggctc

SEQ ID NO: 15220 - RNA, 128 nt, Marinobacterium halophilum
  source 1..128: mol_type = other RNA; note = Related to NZ_PYGI01000034.1
cagcctattggtagattttgggctgcgattcgcagtctttgacaaaaacgtccgaaacactcgccttcgcagttagatgcttacactatgtgaatgcatgcaatacgcgtaagagtaccaataggctc

SEQ ID NO: 15221 - RNA, 127 nt, Aeromonas sp.
  source 1..127: mol_type = other RNA; note = Related to NZ_CP077301.1
cggcttatgggcagattttggattgtgtttcgcaatcagtgaaaaaaatgtcccacaggactcgccatatggcggattgacgcagtgtcgattccgaatataagtgcataagagtgcccataagcct

SEQ ID NO: 15222 - RNA, 130 nt, Mariprofundus ferrooxydans
  source 1..130: mol_type = other RNA; note = Related to NZ_KB902175.1
tggcttatgggcagattttggattgtgatatcgcaatcagtgaaaaaattgtccaatggactcgccccacgggtacgttaatttagcggatctgtgtaacttaagaatgcgtaagagtgcccataagcca

SEQ ID NO: 15223 - RNA, 134 nt, Desulfuromonas acetoxidans
  source 1..134: mol_type = other RNA; note = Related to JABWTG010000018.1
acgcttatgggcagattttggattgcgtttctgcaatcagtgaaaaaatggtgtcgcatcattcgcccgatagcggcccttcaatgttactggtcacatgactaaaatagatgcgtaggagtgcccataagcac

SEQ ID NO: 15224 - RNA, 135 nt, Morganella morganii
  source 1..135: mol_type = other RNA; note = Related to WJFN01000003.1
cagctcacatgcagatttgttggttgcgtttcgcaacctgtgacgacattgtctaagtgattcgccttctcggattgcgccattatagcgtatctgaattacctgctagccgcgcgtaagagtgcatgtgggcta

SEQ ID NO: 15225 - RNA, 131 nt, Marinomonas alcarazii
  source 1..131: mol_type = other RNA; note = Related to NZ_QKLW01000003.1
cggctcacatgcagatttgctggttgcgtttcgcaacctgtgacaacatggtccaagtgactcgccttctaggatgctacattgcgttcttgaattactcgctagcggcgcgtaagagtgcatgtgagcta

SEQ ID NO: 15226 - RNA, 134 nt, Halomonas subterranea
  source 1..134: mol_type = other RNA; note = Related to NZ_FOGS01000013.1
acgctcacatgcagatttgttgattgcgtttcgcaatctgtgacaacatcgtctaagtgactcgccttctcggattgctccatattgctttcctgaattactcgctagcggcgcgtaagagtgcatgtgagcta

SEQ ID NO: 15227 - RNA, 134 nt, Shewanella saliphila
  source 1..134: mol_type = other RNA; note = Related to BMQV01000045.1
tggctcacatgcagatttgttggttgcgtttcgcaacctgtgacaacattgtccaagtgactcgccttctcggattgctccatattgctttcctgaattactcgctagcggcgcgtaagagtgcatgtgagcta

SEQ ID NO: 15228 - RNA, 133 nt, Shewanella sp.
  source 1..133: mol_type = other RNA; note = Related to NC_008750.1
tagctcacatgcagatttgttggttgcgtttcgcaacctgtgacaacatggtccaagtgactcgccttctcggatcgcttcatatgctttcctgaatgactcgcccgcggcgcgtaagagtgcatgtgagcta

SEQ ID NO: 15229 - RNA, 133 nt, Glaciecola pallidula
  source 1..133: mol_type = other RNA; note = Related to BAEQ01000054.1
atgctcacatgcagatttgttggttgcgtttcgcaatctgtgatgacattgtcaatttgactcgccttctcggaatagtctttgagctatcctgaagtacttgccagccgcgcgtaagagtgcatgtgagcac

SEQ ID NO: 15230 - RNA, 131 nt, Shewanella canadensis
  source 1..131: mol_type = other RNA; note = Related to NZ_RXNU01000007.1
aggctcacatgcagatttgttggttgcgcttcgcaaccagtgaccacattgtctaagagactcgcctttcggattgctaatatgccttccggaactactcgccagctgcgcgaaagagtgcatgtgagccg

SEQ ID NO: 15231 - RNA, 133 nt, Pseudidiomarina gelatinasegens
  source 1..133: mol_type = other RNA; note = Related to NZ_RSFE01000007.1
cggctcacatgcagatttgttggttgcgcttcgcaacctgtgacaacattgctagatagactcgcctttcggactactcgtttgagcgtcctggaactactcgccagccgcgcgtaggagtgcatgtgagcca

SEQ ID NO: 15232 - RNA, 131 nt, Rheinheimera sp.
  source 1..131: mol_type = other RNA; note = Related to NZ_JAGPNM010000010.1
tggctcacatgcagatttgttggctgcgcttcgcagcctgtggcaaaattgtcagatagactcgcctttcggacaccatcaacacgtcctggaactactcgccagccgcgcgtaggagtgcatgtgggcca

SEQ ID NO: 15233 - RNA, 130 nt, Shewanella algae
  source 1..130: mol_type = other RNA; note = Related to NZ_JADZGP010000013.1
cggctcacatgcagatttgtgggttgcgcttcgcaacctgtgacaacatggtctgatagactcgcctattcggattgcttatggctttctggaaatactcgctgcggcgcgtaggagtgcatgtgagcca

SEQ ID NO: 15234 - RNA, 131 nt, Oceanimonas sp.
  source 1..131: mol_type = other RNA; note = Related to NC_016745.1
cggctcacatgcagatttgttggttgcgcttcgcaacctgtgacaacatggtccgatggactcgccttcttggatatcgcctagtcttgctggaaatactgctagcggcgcgtaggagtgcatgtgggcca

SEQ ID NO: 15235 - RNA, 133 nt, Aeromonas veronii
  source 1..133: mol_type = other RNA; note = Related to NZ_JRBE01000001.1
aggctcacatgcagatttgttgattgcgaagcgcaatctgtgttaacaatgtccgagtgactcgccttatcggattgcatattattcgatgtcgaatatattgctagccgcgccaaggagtgcatgtgggcct

SEQ ID NO: 15236 - RNA, 136 nt, Vibrio vulnificus
  source 1..136: mol_type = other RNA; note = Related to ABBKEB010000006.1
cggctcacacacagatttgttggttgcgtttcgcaacctgtgaaaaaaacgtccgagtgactcgctatgtaatgattatcgttacgtatcattctgacagtacctgctggcagcgccaaagagtgtgtgtgagcca

SEQ ID NO: 15237 - RNA, 130 nt, Vibrio splendidus
  source 1..130: mol_type = other RNA; note = Related to MAKF01000119.1
gggctcacatccagatttgttggttgcgtttcgcaacctgtgaaaaaaatgtccgagtgactcgccttttgattacaaattgtgcaggtagcaatatatcgcttatgcgcgtaagagtgaatgtgagccc

SEQ ID NO: 15238 - RNA, 132 nt, Vibrio crassostreae
  source 1..132: mol_type = other RNA; note = Related to CP016228.1
tggcttatagacagacttttggttgtgtttcgcaacctgtgaaaaaaatgtccgtaggactcgctaatattactgtgctactagtgtaattgtaaacttatgccggcggcgcaagggagtgtctataagcct

SEQ ID NO: 15239 - RNA, 128 nt, Providencia rustigianii
  source 1..128: mol_type = other RNA; note = Related to NZ_LR134189.1
gagtatgcaggcagattttttagttgtgtttcgcaactagtgaaaacaagggcagaatcgctcgctaatatgattaaagttgtaacgctatgatgagatttgatgcgcaaaggagtgcctgcatactc

SEQ ID NO: 15240 - RNA, 127 nt, Providencia sp.
  source 1..127: mol_type = other RNA; note = Related to WLUH01000023.1
gagcatgcaggcagattttttagttgtgtttcgcaactactaaaaacaagggcaggatcgctcgccaatataatcataattgtaacgctatgataggtttgtaatgcaaaagagtgcctgcatgctc

SEQ ID NO: 15241 - RNA, 131 nt, Proteus mirabilis
  source 1..131: mol_type = other RNA; note = Related to JAGKMM010000039.1
gagcatgtaggcagattttgggattgtgtatcacaatcattgaaaacaacgggtggatatctcgcccactatgattctcatagtattcctagcgattaatcgtagctttgcataagagtgcttacatgctc

SEQ ID NO: 15242 - RNA, 133 nt, Proteus mirabilis
  source 1..133: mol_type = other RNA; note = Related to JH815505.1
tggtatgcaggcagatttttgaattgtgtttcgcaattcttgatttcaagggtagaagttctcgcctgctatgatgaatcatagcgtaatctgcttacaatatgtaaaagtgcgtaagagtgcctgcatacct

SEQ ID NO: 15243 - RNA, 131 nt, Providencia rettgeri
  source 1..131: mol_type = other RNA; note = Related to NZ_CP086257.1
cggtatgcaggcagatttttgaattgtgcatcgcaattcttgattttaatggcgggatttctcgctgctatgatgaatcatagcataatatgctaagtatatgaaaagtgcgtaagagtgcctgcatacct

SEQ ID NO: 15244 - RNA, 133 nt, Yersinia bercovieri
  source 1..133: mol_type = other RNA; note = Related to NZ_JAJAVX010000005.1
tggtgtgcaggcagatttttgaattgtgtttcgcaattcttgatttaaagggcagaaactctcgcctgctatgattctcatagcataatctgcttagaatattataaaagtgcataagagtgcctgcacaccg

SEQ ID NO: 15245 - RNA, 132 nt, Serratia bockelmannii
  source 1..132: mol_type = other RNA; note = Related to NZ_VOUX01000033.1
cggtgtgcaggcagaattttgaattgtgtttcgcaattcttgatttcaagggctcaagctctcgctgctatgattctcatagcaggatttgctgggaatactgtaaaagtgcgtaagagtgcctgcacaccg

SEQ ID NO: 15246 - RNA, 132 nt, Klebsiella grimontii
  source 1..132: mol_type = other RNA; note = Related to NZ_CP067391.1
tggtgtgcaggcagaattttgaattgtgtttcgcaattcttgatttcaagggctcaagctctcgctgctatgattctcatagcagtatttgctgataatattgtaaaagtgcgtaagagtgcctgcacactg

SEQ ID NO: 15247 - RNA, 133 nt, Klebsiella pneumoniae
  source 1..133: mol_type = other RNA; note = Related to UKYY01000005.1
tggtgtgtgggcagaattttgaattgtgtttcgcaattcttgatttcaagggcagaacttctcgcctgctatgatcctcatagcttaatctgcttataatgctgtataagtgcgtaagagtgcctgcacaccg

SEQ ID NO: 15248 - RNA, 132 nt, Pantoea allii
  source 1..132: mol_type = other RNA; note = Related to JAHVXV010000003.1
aggtgtgcaggcagatttttgaattgtgtttcgcaattcttgatttaaagggcagaaagtctcgcccgctatgattctcatagctatatctgcttagtatttttcaaagtgcataggagtgcctgcacacct

SEQ ID NO: 15249 - RNA, 131 nt, Pantoea ananatis
  source 1..131: mol_type = other RNA; note = Related to CP003085.1
aggtgcgcaggcagatttttaggttgtgtttcgcaatcttttattttcaatgttacaagttctcgcctgctatgattctcatagcgtatcttgcggtcaacggttaaatgcataggagtgcccgcgcaccg

SEQ ID NO: 15250 - RNA, 131 nt, Citrobacter freundii
  source 1..131: mol_type = other RNA; note = Related to CP056336.1
aggcatgcaggtagatttttgggttgtggttcgcaatccttgatttcaacggcagaagttctcgccgctatgattctcatagctaatcagcttagaatggatcaaatacgcataggagtgcctgcatgccg

SEQ ID NO: 15251 - RNA, 131 nt, Escherichia coli
  source 1..131: mol_type = other RNA; note = Related to CP061264.1
acgcatgtaggcagatttgttggttgtgaatcgcaaccagtggccttaatggcaggaggaatcgcctccctaaaatccttgattcagagctatacggcaggtgtgctgtgcgaaggagtgcctgcatgcgt

SEQ ID NO: 15252 - RNA, 131 nt, Enterobacter chuandaensis
  source 1..131: mol_type = other RNA; note = Related to NZ_QZCS01000001.1
gcgcatgtaggcagatttgttggttgtgaatcacaaccagtgatctaaatggcaggaggtatcgcctccctgaaatccttgtttcgacgccataaggccacgatgctgtgcgaaggagtgcctacatgcgc

SEQ ID NO: 15253 - RNA, 131 nt, Lelliottia nimipressuralis
  source 1..131: mol_type = other RNA; note = Related to NZ_JAJNQS010000015.1
gcgcatgtaggcagatttgttggttgtgtatcacaaccagtgattttaatggcaggtggaatcgcatccctgacatccttgtttcgtcgctataaggccattgtgctgtgcgaaggagtgcctacatgcgt

SEQ ID NO: 15254 - RNA, 129 nt, Arsenophonus sp.
  source 1..129: mol_type = other RNA; note = Related to NZ_CP084222.1
gcgtatgtaggtagatttgttggttgtgtatcgcaaccggtcattttaatggcgggaactctcgctttccttgaattgttctaatggcaatgcggtaattaagctgcgcgaaagagtacctacatacgt

SEQ ID NO: 15255 - RNA, 128 nt, Klebsiella pneumoniae
  source 1..128: mol_type = other RNA; note = Related to QKNL01000001.1
gcgcgtgtaggcagatttgttgattgtgaatcgcaatcagtgaccgcaatgttagggggtttcgcccgataacagctttgagtcgccgccagatggattatgcggtgcgaaggagtgcctgcatgcgc

SEQ ID NO: 15256 - RNA, 129 nt, Escherichia coli
  source 1..129: mol_type = other RNA; note = Related to AP022044.1
gcacatgcaggtagatttgttggttgtggtatcgcaatcagtgttaacaaggtcgggagtattcgccctctgactgccgtcaagtcatcttggcgtcaccgttaaatgcgtaagagtacctgcatgtgc

SEQ ID NO: 15257 - RNA, 132 nt, Klebsiella quasipneumoniae
  source 1..132: mol_type = other RNA; note = Related to CP047281.1
gcacataggggcagatttgtaggttgtggtatcgcagcctgtgatctaaatgtgagagggactcgccttctgacatccttgtttcatcgtttcgtataactctatgctttgcgtaagagtgcccctatgtgt

SEQ ID NO: 15258 - RNA, 131 nt, Klebsiella pneumoniae
  source 1..131: mol_type = other RNA; note = Related to WBVV01000002.1
gcacatgtaggcagatttgttggttgtggtatcgcaatcagtgatctaaatgttagatggattcgccttctgacatccttgtagccattcttgggctgtcctatgctttgcgtaagagtgcctacatgtgc

SEQ ID NO: 15259 - RNA, 129 nt, Vitreoscilla sp.
  source 1..129: mol_type = other RNA; note = Related to JAGOYO010000023.1
gggtatgcagatagattattaggttgtgcttcacaaccttttttaaaatattaggccaagttggtactaggcttcatttacacctacgtcaaattacttgacgctacgcaaaagagtgtctgcataccc

SEQ ID NO: 15260 - RNA, 146 nt, Bacillus altitudinis
  source 1..146: mol_type = other RNA; note = Related to CP024204.1
aaacgtgtggctagattattcgcttgtgtttcgcaagtgttgaccaaaatggtaggagcattagcttctgctattcgtattactattggtgtatttacgttaaattttcaatgtttctgcatcgcataatgagtagccacacgttc

SEQ ID NO: 15261 - RNA, 144 nt, Bacillus cereus
  source 1..144: mol_type = other RNA; note = Related to JH791914.1
aaacgtgtggctagattttttcgcttgtgtttcgcaagtgttgacaaaaatggtgggagcattagcttttctcatccgcatgatcacgttggtatatttttcgatgtacccggcctgcatcgcctaatgagtagccacacgttt

SEQ ID NO: 15262 - RNA, 145 nt, Cytobacillus firmus
  source 1..145: mol_type = other RNA; note = Related to JACWFJ010000008.1
ttacgtgtggctagattttttcgcttgtgtttcgcaagtgttgacaaaaatggtgggaacattagcttctcctatcctaacttagcatgatcgtatatttatcgatttggtcgattttgtccgcataatgagtagccacacgttt

SEQ ID NO: 15263 - RNA, 143 nt, Rummeliibacillus sp.
  source 1..143: mol_type = other RNA; note = Related to NZ_ML122604.1
agtcgtgtggctagactttttcgcttgtgtttcgcaagtgttgacaaaaatggtaggaggattagcttctattattcttaatatttaccggattttatataaatctattagtttttcactgcataatgagtagccacacgctt

SEQ ID NO: 15264 - RNA, 146 nt, Bacillus thuringiensis
  source 1..146: mol_type = other RNA; note = Related to NFCM01000080.1
taacgtgtggctagattttttcgcttgtgcttcgcaagtgttgacaataatggtgggagcattcgcttctccgattctaattatccgcatggaggtatcttctaaggtaaactcgccgcctctgcctaatgagtagccacacgttt

SEQ ID NO: 15265 - RNA, 146 nt, Bacillus safensis
  source 1..146: mol_type = other RNA; note = Related to NZ_CP015611.1
taacgtgtggctagattttttcgcttgtgtttcgcaagtgttgacaataaaggtgggagcattcgcttctccgattctaactatctacttggaggtaacttttacggtaaactcgacgcctctgcataatgagtagccacacgttt

SEQ ID NO: 15266 - RNA, 140 nt, Bacillus velezensis
  source 1..140: mol_type = other RNA; note = Related to CP048002.1
tagcgtgtggctagatctttttgcttgtgtttcgcaagtgttgactaaaatggtgagaacatttgcttctcctattatcatattggtgtattattcgccgatgtatccgatattaccgcataatgagtagccacacgttt

SEQ ID NO: 15267 - RNA, 147 nt, Bacillus tequilensis
  source 1..147: mol_type = other RNA; note = Related to CP048852.1
atgcgtgtggctagattttttcgcttgtgtttcgcaagtgttgacaaaaatggtagaggcatttgcttctccgactctccgtattaccatgtcggtaaatttgctgatgtgtacagttttcaacgcctaatgagtagccacacgtta

SEQ ID NO: 15268 - RNA, 149 nt, Sporosarcina sp.
  source 1..149: mol_type = other RNA; note = Related to JADPRZ010000022.1
atgcgtgtggctagatttttttcgcttgtgtttcgcaagtgttgacaaaaatggtgggaacattagcttctcctattcctaatacttatcatgtcggtatatttaccgatttatccgattagcttcgcataatgagtagccacacgttt

SEQ ID NO: 15269 - RNA, 147 nt, Sporosarcina koreensis
  source 1..147: mol_type = other RNA; note = Related to NZ_LQYA01000064.1
aaacgtgtggctagattttttcgcttgtgtttcgcaagtgttgacaaaaatggtgggagcattagcttctactattccaatatttatcatgtcggtatggttgccgatatgtcctattagcttcgcataatgagtagccacacgttt

SEQ ID NO: 15270 - RNA, 147 nt, Cohnella phaseoli
  source 1..147: mol_type = other RNA; note = Related to NZ_QRDZ01000063.1
aaacgtgcggctagatttttcacttgtgcttcgcaagtgttgtcaaaaatggtggggatatttgctctctctcatataagcggtgtttgccgaagtagttgtctcttatcatcgcgttttcatcgcataatgagtagccgcacgtac

SEQ ID NO: 15271 - RNA, 144 nt, Paenibacillus tritici
  source 1..144: mol_type = other RNA; note = Related to NZ_CP073365.1
aaacgtgcggctagatttttcacttgtgcttcgcaagtgttggcataaatggtgggattgtttgcttcctctcatattagtattagccgtaatagtcatctcttatcatcgcgttttcatcgcataaggagtagccgcacgtac

SEQ ID NO: 15272 - RNA, 146 nt, Ornithinibacillus halotolerans
  source 1..146: mol_type = other RNA; note = Related to NZ_BMEY01000002.1
aagcgtgtggctagatttttcgcttgtgtttcgcgagtgttggcaataatggttgggagattagcttctccgtactatcatgtattatcatgtatgagcaatgttgatatattgatcatgttcgcctaatgagtagccacacgtat

SEQ ID NO: 15273 - RNA, 145 nt, Paenibacillus sp.
  source 1..145: mol_type = other RNA; note = Related to FNNT01000003.1
atgcgtgtggctagatctttcgcttgtgtttcgcaggcgttaacaaaaatgtcgggaggatttgcttctctctattctatttttatcgttttatgatattcgctaatttgatcggattaatcgcataatgagtagccacacgtgt

SEQ ID NO: 15274 - RNA, 138 nt, Halobacillus sp.
  source 1..138: mol_type = other RNA; note = Related to JAIEZV010000001.1
tagcgtgtggctagatttttcgcttgtgcttcgcaagcgttgacaataatggtgggaacattagcttctcgtattctattaaatttgactatttggtcgttttattagcatgatcgcataatgagtagccacacgtta

SEQ ID NO: 15275 - RNA, 136 nt, Salibacterium salarium
  source 1..136: mol_type = other RNA; note = Related to NZ_RBVX01000055.1
aaacgtgtggctagattttattacttgtgtttcgcaagtagtgacaaaaatggtgggcacattcgctgtcgtcattctatcgatcatctatcgctttatgatcgctttgcttcgcttaaggagtagccacacgttt

SEQ ID NO: 15276 - RNA, 124 nt, Alkalihalobacillus pseudalcaliphilus
  source 1..124: mol_type = other RNA; note = Related to LFJO01000006.1
ttgcgtgtggctagatttttttggcttgtgtatcgcaagcgtttacaacaatggtggggacatttgctttcctattattctattattatccgctattaattgcttaatgagtagccacacgtac

SEQ ID NO: 15277 - RNA, 148 nt, Bacillus toyonensis
  source 1..148: mol_type = other RNA; note = Related to NVIC01000027.1
aatcgtgtggctagattattcgacttgtgtttcgcaagtcttatcaggaagggggggagcttttgcttctcttccacatttacttagtagtctttgcttactatgctattttgctattttgcttcgcgtaaggagtagccacacgttt

SEQ ID NO: 15278 - RNA, 141 nt, Bacillus toyonensis
  source 1..141: mol_type = other RNA; note = Related to NVFR01000056.1
aatcgtgtggctagagtatttgacttgtgtttcgcaagttttgtcaagaaagtggggggcgtttgccctctctattaagtttacttagtagtctttatttactaaactatttagcttcgcctaaggagtagccacacgttt

SEQ ID NO: 15279 - RNA, 126 nt, Acetobacterium woodii
  source 1..126: mol_type = other RNA; note = Related to NC_016894.1
atgcacgcggctagattttgtgtctgtggttcgcagacgttgaaaaaaatgtgggggacttttgcttactacatcaatttaaattatttgccataataatttgtcataatgagtagccgcgtgcac

SEQ ID NO: 15280 - RNA, 140 nt, Eubacterium sp.
  source 1..140: mol_type = other RNA; note = Related to NZ_AP024845.1
aaacgtgtggttagattatggacttgtgtttcgcaagtattggtgaaaatggtaggaagatatgctctctatcaatctgtattatgcttatgtatattttattatatattacgcatcgcataatgagtaaccacacgttt

SEQ ID NO: 15281 - RNA, 129 nt, unidentified
  source 1..129: mol_type = other RNA; note = Related to JAAYPT010000052.1; note = Clostridiales bacterium
aagcgtgtggttagattgtggacttgtgtttcgcaagtgttgactaaaatggtaggaagatatgctctcttatcaatccattctatgtgtatgtatattacgcattgcataatgagtaaccacacgttt

SEQ ID NO: 15282 - RNA, 142 nt, Oceanobacillus iheyensis
  source 1..142: mol_type = other RNA; note = Related to NZ_LT727777.1
atacgtgtggcaagattttattgcttgtgtttcgcaagtattgactcaaatggtggaaacatttgctactcggataggttgacggtgagtagtatactagttggctacttgtctgcttcgcataatgagttgccacacgtat

SEQ ID NO: 15283 - RNA, 129 nt, Lachnospira pectinoschiza
  source 1..129: mol_type = other RNA; note = Related to JAJCRR010000003.1
atgcgtgtggctagatttttggcttgtgtttcgcaagctttgatggaaatggtaggaggatttgcagaaatatacgcccttccgtcctgtgtataaagggaaaaatgcataatgagtagccacacgctt

SEQ ID NO: 15284 - RNA, 126 nt, unidentified
  source 1..126: mol_type = other RNA; note = Related to JAFTZX010000234.1; note = Lachnospiraceae bacterium
atgcgtgtggctagattttttgcttgtgtttcgcaagtgttgatagcaatggtggggagactcgcacacattaatcgatactattcgatgtaatccgtttaggtgataatgagtagccacacgcaa

SEQ ID NO: 15285 - RNA, 140 nt, Trichococcus ilyis
  source 1..140: mol_type = other RNA; note = Related to NZ_FNYT01000006.1
acgcgtgtggttagatttttggcttgtgcttcgcaagccttgactcaaatggtggtaagatttgcttatcctatgagcatccttgattatccgtatactattgcacaatatgcttttgcataatgagttgccacacgctt

SEQ ID NO: 15286 - RNA, 145 nt, Pectinatus frisingensis
  source 1..145: mol_type = other RNA; note = Related to NZ_WIQQ01000012.1
cagcgtgcggttagattttgggcttgtgtttcgcaagctttgagaaaaatggtagagagactagctactatattcgtttttaaagttgtccattgttatttcttggtaataactatgttttagcataatgagtagccgcacgcaa

SEQ ID NO: 15287 - RNA, 143 nt, unidentified
  source 1..143: mol_type = other RNA; note = Related to SAAV01000006.1; note = Clostridia bacterium
gagcgtgtggtaagattttgtgcttgtgtttcgcaagtgttgactaaaatggtagagtcgtttgctctcatccatgttgccgtattatgcaatatgtgttctagtgttcagtgtagcattgcttaatgagttgccacacgctc

SEQ ID NO: 15288 - RNA, 129 nt, Enterococcus dispar
  source 1..129: mol_type = other RNA; note = Related to KE136354.1
tagtgtgtggctagattttgtacttgtgtttcgcaagttttgacaaaattgctagggagaatagccttagtaatccgcaatttatgatcctttttctacgcagtgggcctaatgagtagccacgcacga

SEQ ID NO: 15289 - RNA, 173 nt, Ligilactobacillus murinus
  source 1..173: mol_type = other RNA; note = Related to NZ_MPSN01000002.1
taacatgcgactagattttggacttgtgcgttcgcaagtattgattaaaatggggggacgatttgcctcattcatcgaccgtaagaaaagaattaatcatatgggtcatgccaattatcggttactgtataaatgtaagctatattggtggcataatgagtagtcgcatgttt

SEQ ID NO: 15290 - RNA, 131 nt, Enterococcus sp.
  source 1..131: mol_type = other RNA; note = Related to NZ_NGLI01000001.1
ttgcgtgtggctagattttgtacttgtgtttcgcaagtattgattaaattgctagggacaatagccagtaggtataagggtgtttaacctttttcttcgcatatttcagcctaatgagttgccacacgctt

SEQ ID NO: 15291 - RNA, 130 nt, Listeria booriae
  source 1..130: mol_type = other RNA; note = Related to JAARYB010000009.1
atgcgtgtggctagattattgatatgtgtttcgcatatcttgagaaaatggctgggaaggaaagctactattcgaaacgcgtctatagcgttttgcctctgtgttttgcctagtgagttgccacacgcta

SEQ ID NO: 15292 - RNA, 136 nt, Enterococcus faecalis
  source 1..136: mol_type = other RNA; note = Related to CP022488.1
tggcgtgtggctagattttgtacttgtgattcgcaagttttgattaaaatgttggtagctatagctattagacagcctttaagtatataagcaatcttttatgctagtgtcgtgcctaatgagttgccacatgcta

SEQ ID NO: 15293 - RNA, 130 nt, Listeria weihenstephanensis
  source 1..130: mol_type = other RNA; note = Related to NZ_CP011102.1
atgcgtgtggctagattttgcacttgtgattcgcaagttttgattaaatagctgggaattctagcttctttgtactatatttttcagcaattttctacgctgaatgagcctaatgagttgccacacgcta

SEQ ID NO: 15294 - RNA, 143 nt, Enterococcus sp.
  source 1..143: mol_type = other RNA; note = Related to NZ_MAEJ01000004.1
gtgcgtgtggcaagattttttgacttgtgtttcgcaagttatgacaaaaagggtagctagtaagcatgcctccaataccatagcgacaatatataatgagttgtttaccgaccatgcttcgcataatgagttgccacacgctt

SEQ ID NO: 15295 - RNA, 142 nt, Carnobacterium divergens
  source 1..142: mol_type = other RNA; note = Related to NRQF01000015.1
tggcgtgtggctagattttgtacttgtgcttcgcaagtattgacaaaaatggtaggaagtttagctgtcatcaatagttatttgagcattgggaaatatatctgctcagcattttagaggcctaatgagttgccacacgctt

SEQ ID NO: 15296 - RNA, 151 nt, Megamonas hypermegale
  source 1..151: mol_type = other RNA; note = Related to NZ_NFIW01000013.1
aagcgtatggttagattgtggacttgtgtttcgcaagtattgaaataaaaggtaagtatacaagctgccttcatgtaaactatttagggcgtataagtttatataaagcttatctatcttaatgtattgcgtaatgagtaaccatacgcat

SEQ ID NO: 15297 - RNA, 152 nt, Fusobacterium sp.
  source 1..152: mol_type = other RNA; note = Related to CP024698.1
atgtgtgtggttagattttttacttatgtttcgtaagtattgactaaaatgttagaaagttttgctaatgttgtgcaaattactcatagcttcatctaacttaataattctatttattatatttaaatcgcttaatgagttgccacacactt

SEQ ID NO: 15298 - RNA, 156 nt, Fusobacterium canifelinum
  source 1..156: mol_type = other RNA; note = Related to NZ_CP068114.1
aagcgtgtggttagattttttacttatgcaattcgtaagtatttactaaaatgttagggcattttgctctaatagtatgctaacttaattagcttcatttgactaattctattattatcattaatttgatatcgcttaatgagttgccacacgctt

SEQ ID NO: 15299 - RNA, 140 nt, unidentified
  source 1..140: mol_type = other RNA; note = Related to JAGAAC010000102.1; note = Clostridia bacterium
aggcgtgtggttagattctgcgcttgtgtttcgcaagtgttgactaaaatgttatgacttgattctctttagcactgtatgatttaagcgcttattcaggcggttacagttcataatgcataatgagtaaccacacgcct

SEQ ID NO: 15300 - RNA, 129 nt, Bacillus toyonensis
  source 1..129: mol_type = other RNA; note = Related to NVHA01000086.1
gaatgtgtggttagattttttaacttgtgcttcgcaagttttgacaaaaatggtaggaagacttgtttccgcctcgtagtgtaccgatattaatcgatcctgtagaacgtaatgagtaaccacacgttc

SEQ ID NO: 15301 - RNA, 130 nt, Bacillus sp.
  source 1..130: mol_type = other RNA; note = Related to NTTM01000084.1
gaatgtgtggttagattttttaacttgtgcttcgcaagttttgacgaaaatggtaggaagacttgttttccgcctcgtagtgtaccgatagttatcgatcctgtagaacgtaatgagtaaccacacgttc

SEQ ID NO: 15302 - RNA, 134 nt, Sporosarcina sp.
  source 1..134: mol_type = other RNA; note = Related to NZ_CP071798.1
taacgtgtggttagattttttaacttgtgcttcgcaagttttgacaaaaatggtggggatacttgtttccgcctcatattctaatatacgataacgtatatatcctgaggaacgtaatgagtaaccacacgttc

SEQ ID NO: 15303 - RNA, 135 nt, Lysinibacillus sp.
  source 1..135: mol_type = other RNA; note = Related to JPUW01000004.1
taacgtgtggttagatttttaacttgtgcttcgcaagttttgacaaaaatggtagggagatttgttccttattcatcatataattgtaccgtatggtgccgattcctatagaacgtaatgagtaaccacacgttc

SEQ ID NO: 15304 - RNA, 129 nt, Enterococcus faecalis
  source 1..129: mol_type = other RNA; note = Related to VHRP01000005.1
aaacgtgtggttagatttttgacttgtgattcgcaagttttgacaacaatggtaggaagttttgtttccttatatatcatgcacaatggtacctgtaccctatagaacgtaatgagtaaccacacgttc

SEQ ID NO: 15305 - RNA, 143 nt, Enterococcus faecalis
  source 1..143: mol_type = other RNA; note = Related to NZ_CP046022.1
ggacgtgtggttagatttttgacttgtgattcgcaagttttggcaataatggtagagtggtttgttctctgtactccataacaaaggtttccggagtaaccgtcggatacctataaaagaacgtaatgagtaaccacacgttc

SEQ ID NO: 15306 - RNA, 129 nt, Listeria monocytogenes
  source 1..129: mol_type = other RNA; note = Related to CP076644.1
agacgtgtggttagattttcaacttgtgtttcgcaagttttgataaaaacggtagaaagacttgttcattagccttactgtaccataggcgctattgcctataaaacgtaatgagtaaccacacggtct

SEQ ID NO: 15307 - RNA, 141 nt, Bacillus subtilis
  source 1..141: mol_type = other RNA; note = Related to NZ_CP009684.1
gaacgtgtggttagattttttaacttgtgtttcgcaagttttgacaaaaatggtagggagatttgttccttattactcgtataattgtattgtatcgtatagtttcgattcctatagaacgtaatgagtaaccacacgttc

SEQ ID NO: 15308 - RNA, 131 nt, Metasolibacillus meyeri
  source 1..131: mol_type = other RNA; note = Related to NZ_PYWN01000149.1
gaatgtgtggttagattttcaacttgtgtttcgcaagttttgacaaaaatggtagggagatttgttccttattcatcataatgtaccgtatggtgcagattccttagaacgtaatgagtaaccacacgttc

SEQ ID NO: 15309 - RNA, 136 nt, Listeria booriae
  source 1..136: mol_type = other RNA; note = Related to JAARXI010000004.1
aagcgtgtggctagattttttacttatgattcgtaagtattgactaaattggcagaatcaattgctgcatttattagcctgtctcaattttgcatatccgtgttgcatattgcgcataatgagttgccacacgcct

SEQ ID NO: 15310 - RNA, 137 nt, Veillonella magna
  source 1..137: mol_type = other RNA; note = Related to NZ_KE386795.1
agacgcatgagaagattttttgcttgtgattcgcaagcattgacaaaaaagtgcacatcgcgcttctgtgccaaattaatgatactcaatagtttatgagtagtttatagtttagcctaatgagttctcgtgcgtct

SEQ ID NO: 15311 - RNA, 144 nt, Pseudoflavonifractor sp.
  source 1..144: mol_type = other RNA; note = Related to NFKI01000003.1
gagcgtgtggcaagattttgtacttgtgtttcgcaagtgttgaccaaactgggtggtgctttagcgtattgccctttcccgttatgatgttaacatgttcatcatgttgactaatccgtccgcataatgagttgccacacgctc

SEQ ID NO: 15312 - RNA, 145 nt, unidentified
  source 1..145: mol_type = other RNA; note = Related to JAGZJF010000013.1; note = Oscillospiraceae bacterium
gagcgtgtggcaagattttgtacttgtgtttcgcaagtgttgaccaaactgggtggtgctttagcgtattgccctttcctgccatgatgttactcgtgttcatcatgttgactaatccgtccgcacaatgagttgccacacgctc

SEQ ID NO: 15313 - RNA, 146 nt, Intestinimonas sp.
  source 1..146: mol_type = other RNA; note = Related to NZ_JACOEA010000001.1
gagcgtgtggcaagattttgtacttgtgtttcgcaagtgttgactaaactgggtggcgctttagcgtattgcccttccctgccatgatgttactcgtgttagctcatgtcgacttgtcctttcgcacaatgagttgccacacgctc

SEQ ID NO: 15314 - RNA, 146 nt, unidentified
  source 1..146: mol_type = other RNA; note = Related to QUKQ01000046.1; note = Ruminococcaceae bacterium TF06-43
gagcgtgtggcaagattttgtacttgtgtttcgcaagtgttgactaaactgggtggcacattagcgtattgccctttctttccatgatgttaactgtgttaactcatgttgactgatcctttcgcacaatgagttgccacacgctc

SEQ ID NO: 15315 - RNA, 149 nt, Caproiciproducens sp.
  source 1..149: mol_type = other RNA; note = Related to NZ_CP035283.1
tagcgtgtggcaagattttgtgcttgtgtctcgcaagcgttgataaaaatggtaggcacgtttgcttatcactctatttctacatgttgtacgctgatagtatcgctgtacatcatgcatcatcccgcataatgagttgccacacgctt

SEQ ID NO: 15316 - RNA, 147 nt, unidentified
  source 1..147: mol_type = other RNA; note = Related to JAGAWV010000307.1; note = Acidaminococcaceae bacterium
aaacgtgtggcaagattttgagcttgtgtttcgcaagctttgacgaaaatggtgcattagcgtctatcagctgttgaccgtccttgtgttatgcgatgtaagcttgttctgttcgcacactcttgcataatgagttgccacacgttt

SEQ ID NO: 15317 - RNA, 133 nt, unidentified
  source 1..133: mol_type = other RNA; note = Related to JAHAER010000020.1; note = Firmicutes bacterium
aagcgtatggcaagattttttgtttgtgtttcgcaaacattgattaaacggatagagcatttgctggatttattacaaccagaagagaaacggacagagcgacgttttcagcctaatgagttgccatacgctt

SEQ ID NO: 15318 - RNA, 132 nt, unidentified
  source 1..132: mol_type = other RNA; note = Related to JAAYIN010000072.1; note = Clostridiales bacterium
aagcgtgtggcaagattttgtacttgtgtttcgcaagtgttgataaaaatggttgggggaattgcctaaatcaaatgccgctgacgatcaaacaaaactaaatgcttcggcataatgagttgccacacgcct

SEQ ID NO: 15319 - RNA, 145 nt, unidentified
  source 1..145: mol_type = other RNA; note = Related to JAJCJJ010000005.1; note = bacterium 210917-DFI.7.65
aagcgtgtggcaagatcatgtgcctgtgtttcgcaagcgttgacgaaaatgccggggagatttgcttccttgtatcattttcctgcataaaacagcagaaaacaatgagggctggtgtgctcgcgtaatgagttgccacacgctt

SEQ ID NO: 15320 - RNA, 131 nt, unidentified
  source 1..131: mol_type = other RNA; note = Related to SVGI01000005.1; note = Clostridiales bacterium
aagcgcatggcaagattttgtgcttgtgtttcgcaagtgttgacaaaaatgttcggggcatttgcttcgtcgtgcaatccctgaaaacctgtatacgcgtttgcgtttgcttaatgagttgccatgcgccc

SEQ ID NO: 15321 - RNA, 130 nt, unidentified
  source 1..130: mol_type = other RNA; note = Related to BK026599.1; note = Siphoviridae sp.
aagcgtatggcaagatttttggcttgtgtttcgcaagcgttgactaaaatggtgggagcatttgcgtctttccatgcttcgtcgcctctttaatctctgtaaatttcgcataatgagttgccatacgctg

SEQ ID NO: 15322 - RNA, 132 nt, unidentified
  source 1..132: mol_type = other RNA; note = Related to NZ_NFJU01000007.1; note = Proposed Anaeromassilibacillus sp.
gagcacatggcaagattttgtactcgcggatcgcgggtgttgactaaaatggtggggactttagccctttatcattctttaatcgtaaacagggatagatacttttgctgcataatgagttgccatgtgctc

SEQ ID NO: 15323 - RNA, 134 nt, unidentified
  source 1..134: mol_type = other RNA; note = Related to BQOK01000001.1; note = Oscillospiraceae bacterium
gagcacatggcaagattttgtactcgcgtatcgcgagtgttgactaaaatggcaggggagttggctcctccatccgtttggccgttacccatacaaagagagaatctttttgcataatgagttgccatgtgctc

SEQ ID NO: 15324 - RNA, 134 nt, unidentified
  source 1..134: mol_type = other RNA; note = Related to DWWX01000035.1; note = Candidatus Gemmiger stercorigallinarum
gagcatatggcaagattttgtactcgcgcatcgcgggtgttgactaaaatggcaggaagtttagctctcctccatcatttcggcggtacagttgtaatcctggtcctccacgcataatgagttgccatgtgctc

SEQ ID NO: 15325 - RNA, 130 nt, Clostridiisalibacter paucivorans
  source 1..130: mol_type = other RNA; note = Related to NZ_JHVL01000054.1
ttgcgtgtggctagagttttttgcttgtgtttcgcaagtattgataaaaaggttgggaatattcgcaactttctggctgtactattttaccacgtaatacatgttgtgcataatgagtagccacacgcaa

SEQ ID NO: 15326 - RNA, 148 nt, unidentified
  source 1..148: mol_type = other RNA; note = Related to JAFVVV010000369.1; note = Clostridia bacterium
gagcatatggcaagattttgggcttgtgtttcgcaagcgttgactaaaatggtaggggacttttgctctatcatcattttttgaaatggcttttatgtgtcttgatggcacttgtaccatttcgagcgtaatgagttgccatatgctc

SEQ ID NO: 15327 - RNA, 148 nt, unidentified
  source 1..148: mol_type = other RNA; note = Related to JAFYAQ010000001.1; note = Oscillospiraceae bacterium
gagcgtgtgacaagattttgggcttgtgtttcgcaagctttgattaaaatggtagatggatttgctatctatcgtcatttccagtactgttatgtttatgttctgtttacccgtatgcaccatccgcataatgagttgtcacacgctc

SEQ ID NO: 15328 - RNA, 144 nt, Clostridium perfringens
  source 1..144: mol_type = other RNA; note = Related to ABABDZ010000001.1
tagtgtgtggctagattttttgcttgtgtttcgcaagtattgattttaatggtaggaacttttgctatcatctagattttagctagtatagctttattttagctagtaaaaattgcttttagcataatgagttgccacacacct

SEQ ID NO: 15329 - RNA, 126 nt, Campylobacter lari
  source 1..126: mol_type = other RNA; note = Related to AACDFA010000001.1
catagcatgataagattttttatttgtgtttcgcaaatattgacaaaaaagttatgttattatctaaataatcttagcttcatttttatcatcaatatttctgatgtaatgagttatcatgctatt

SEQ ID NO: 15330 - RNA, 144 nt, Listeria sp.
  source 1..144: mol_type = other RNA; note = Related to NZ_FYBR01000008.1
aagcgtgtggctagattttgtacttgcgcttcgcaagtgttgattaaaagggtggcagtatttgcagcttctgcatccccttctcaaaatgatgtgcggccgttgcatatgattgttcattgcgtaatgagtagccacacgcga

SEQ ID NO: 15331 - RNA, 151 nt, Enterococcus sp.
  source 1..151: mol_type = other RNA; note = Related to JACVVC010000001.1
tgacatgtggctagattttttggcttgtgattcgcaagtcttgactaaaatggtgggcagatttgctggcttatcaacttaccggttagactctttgtgtaattgtattaaggagtttatgctatttcgcgtaatgagtagccacatgttt

SEQ ID NO: 15332 - RNA, 143 nt, Enterococcus faecium
  source 1..143: mol_type = other RNA; note = Related to QPVP01000009.1
agacgtgtggctagattttgggcttgtgtttcgcaagcgttgactaaaatggtagggagttttgcttactgtacaatatacccgttgtattatttgcaactgtatggatcttcatgcttcgcataatgagtagccacacgttt

SEQ ID NO: 15333 - RNA, 145 nt, Enterococcus faecium
  source 1..145: mol_type = other RNA; note = Related to NZ_CP042833.1
aaacgtgtggctagattttgggcttgtgtttcgcaagcattgactaaaatggtaggaagttttgctaacttatcaaattacattatatacattggtatcaacggtattacactctctgcttcgcataatgagtagccacacgttt

SEQ ID NO: 15334 - RNA, 144 nt, Enterococcus mundtii
  source 1..144: mol_type = other RNA; note = Related to NZ_MCRG01000029.1
agacgtgtggctagattttgtacttgtgtttcgcaagtattgacaaaaatggtaggaagttttgcttattacaaacatcccttagacaagtatggggagcttttaaagtatgcttaaattcgcataatgagtagccacacgtta

SEQ ID NO: 15335 - RNA, 142 nt, Enterococcus hirae
  source 1..142: mol_type = other RNA; note = Related to JAKNTG010000011.1
agacgtgtggctagattttgtacttgtgtttcgcaagtattgactaaaatggcaggaaattttgctatctctgaaagatgcagcagagaaaataagggatcttatacatgcttgaatacgcataatgagtagccacacgtta

SEQ ID NO: 15336 - RNA, 137 nt, Listeria monocytogenes
  source 1..137: mol_type = other RNA; note = Related to NZ_CP063383.1
aagcgtgtggctagattgtgtacttgtgtttcgcaagtattgactaaaacggtgggaactttgctcacctctaaacttacctgctaaaagtaatacaggagtaacgtgcgccctgcgtaaggagtagccacacgtat

SEQ ID NO: 15337 - RNA, 151 nt, unidentified
  source 1..151: mol_type = other RNA; note = Related to RKEI01000021.1; note = Clostridiales bacterium
aagcgtgcagcaagattttgtgcttgtgtttcgcaagtgttgacaagaacggtgagaagattcgctctcatgtcacctgtttatccctattaactttttgtgtagcttatagttatatacatatttccgcataatgagttgccgcacgctt

SEQ ID NO: 15338 - RNA, 131 nt, unidentified
  source 1..131: mol_type = other RNA; note = Related to JAFXUW010000045.1; note = Oscillospiraceae bacterium
tggcgtgtggcaagattttttgcttgtgtttcgcaagcattgacaaaaacggtaggttcgtttgccttccattccatggcgtccatgactcgcctgcagctattatcggcataatgagttgccacacgcca

SEQ ID NO: 15339 - RNA, 123 nt, Campylobacter mucosalis
  source 1..123: mol_type = other RNA; note = Related to NZ_LIWN01000009.1
aagtatgtggctagattttttacttgtgtttcgcaagtattgactaaaatatagcaaaacttttgctactacatctttagcatatattaatagagcatgtgcttaatgagttgccacatacga

SEQ ID NO: 15340 - RNA, 116 nt, Campylobacter sp.
  source 1..116: mol_type = other RNA; note = Related to RBJN01000156.1
agatgtgtggctagattttgtgtttgtgtttcgcaaacgttgactaaaatgttggcaaactttgctacatgcttacaataatgcaattattttgtataatgagttgccacacattc

SEQ ID NO: 15341 - RNA, 124 nt, Campylobacter concisus
  source 1..124: mol_type = other RNA; note = Related to NZ_CP060707.1
taaggcgtagctagattttgtacttgtgtttcgcaagtattgactaaaatgttatagaggtttttatctacatcagcatattaatacatagcatcttatgcacttaatgagtggctacgccgat

SEQ ID NO: 15342 - RNA, 143 nt, unidentified
  source 1..143: mol_type = other RNA; note = Related to JAFRHU010000008.1; note = Clostridia bacterium
tgacgtgtggcaagatcttgtacttgtgtttcgcaagtattgactaaaatggtagggctatttgcttatcatcttcattggcattatggccaaacgaccgggattttcccgagacttttcgcataatgagttgccacacgtca

SEQ ID NO: 15343 - RNA, 142 nt, unidentified
  source 1..142: mol_type = other RNA; note = Related to JAFWMS010000015.1; note = Clostridia bacterium
agacgtgtggcaagatcctgtacttgtgtttcgcaagtattgactaaaatggtagggttatttgttctatatctctattattctatatggcaatgctctggtagtctgccgagatcttcgcataatgagttgccacacgtca

SEQ ID NO: 15344 - RNA, 142 nt, unidentified
  source 1..142: mol_type = other RNA; note = Related to JAFZIH010000156.1; note = Clostridia bacterium
tgacgtgtggcaagatcttgtacttgagtttcgcaagtattgactaaaatggtagggcttttgctcttcatctgcgttagcattgtggccattgaaccgggattctcccgagtcattttgcataatgagttgccacacgtca

SEQ ID NO: 15345 - RNA, 129 nt, Schleiferilactobacillus harbinensis
  source 1..129: mol_type = other RNA; note = Related to JAGFBC010000073.1
ttgcgtatgactagaattttggcttgtgtttcgcaagtcttgacatgaatggtaggttggattggcagttttacacagggttctcccaaaacggtgggcgctttgcgcgtaatgagtagtcatacgcgc

SEQ ID NO: 15346 - RNA, 127 nt, Dialister sp.
  source 1..127: mol_type = other RNA; note = Related to JAHADJ010000026.1
aagcatgtgacaagattttttacttgtgtttcgcaggtatttatagcaatggtaggagcaatagcgcttccataagtttcactactgagagtctcagattctctgcataatgagttgtcacatgctt

SEQ ID NO: 15347 - RNA, 137 nt, Dialister invisus
  source 1..137: mol_type = other RNA; note = Related to SCPI01000001.1
aagcatgtggcaagattttgtgcttgtgcttcgcgagcattgcaaataatggttggtgtattggcttgtcttcctggtgaatttttgtttttgtgagttcctcagggattatccgcgtaatgagttgccacatgctt

SEQ ID NO: 15348 - RNA, 129 nt, Eubacterium minutum
  source 1..129: mol_type = other RNA; note = Related to CP016202.1
atgcgtgcggttggatttttcgcttgtgtttcgcaagtgttgattaaaatgttagggtcaattgcgttttgcttttgatcgacttcttctaaacttttgttgctatgcataatgagcaaccgcacgtac

SEQ ID NO: 15349 - RNA, 138 nt, Staphylococcus schleiferi
  source 1..138: mol_type = other RNA; note = Related to CP009676.1
ttaagcgtggctagattttgtggttgtgtttcgcaatcgttgaatttattgtaagagtatgttgcttcttatatttttaagtttgtaatattcagaagtttagctttagtattacgcctaatgagtagccacgccttt

SEQ ID NO: 15350 - RNA, 140 nt, Staphylococcus saprophyticus
  source 1..140: mol_type = other RNA; note = Related to CP022056.2
gtaagcgtggctagattttgtggttgtgtttcgcaaccattgcacttattgcaaggagtgactgcttcttgtaattttcagctcataatattcaggaatttagctttggtatttctcgcctaatgagtagccacgccttt

SEQ ID NO: 15351 - RNA, 144 nt, Exiguobacterium sp.
  source 1..144: mol_type = other RNA; note = Related to NZ_JACSMB010000004.1
agacgtgtggttagattttttgcttgtgtttcgcaagcattgacataaatggtaggagtattagcgatatatttctccgcttttctctgctgttaacattagcttttcgatgagtttagccgcataaggagtaaccacacgtct

SEQ ID NO: 15352 - RNA, 148 nt, unidentified
  source 1..148: mol_type = other RNA; note = Related to JAFPWD010000023.1; note = Clostridia bacterium
aaacgtgcggcaagattttgtacttgtgtctcgcaagtattgacgaaaacggtaggaggactagcgccttcacattactggtattgcattggattgcattgcattgaggtgcgattcgactgcgcgcggaatgagttgccgcacgttt

SEQ ID NO: 15353 - RNA, 145 nt, Eubacterium sp.
  source 1..145: mol_type = other RNA; note = Related to JAFVFJ010000126.1
tgatgcatggcaagattttgtactagtgtttcgctagcattgactaacttgtaaggagacatatctgctgtttacaatcttttatcgcaatatatgttttacatacgaatgtaatactttacgcataatgagttgccatgcatcg

SEQ ID NO: 15354 - RNA, 136 nt, Lactiplantibacillus plantarum
  source 1..136: mol_type = other RNA; note = Related to CP033618.1
atgggtgggactagattattggccgatgattcgtcggtcttgctttgaatggtatgagctttctctaattgttaacactgtactagcctgtaaaaatttccggctgtcgcagtagacaatgagtagtcccatcctt

SEQ ID NO: 15355 - RNA, 137 nt, Streptococcus thermophilus
  source 1..137: mol_type = other RNA; note = Related to WTXU01000099.1
atgggtggggctagattattgaccgatgattcgtcggccttgcatcaaatggtacgagctttctctgactgttaacaaatgtgttagcctgttaacttttccggctgtcgcataagataatgagtagccccatcttt

SEQ ID NO: 15356 - RNA, 138 nt, Lactiplantibacillus plantarum
  source 1..138: mol_type = other RNA; note = Related to VHJC01000059.1
atgagtggggctagatttttgatcgatgattcgtcgattttgcaaaaaatggtagggactttctatagaaatgttgtctaaatgtatcataggtggacgtttccagctgtcgcttagataatgagtagccccattctt

SEQ ID NO: 15357 - RNA, 153 nt, Apilactobacillus kunkeei
  source 1..153: mol_type = other RNA; note = Related to JXDF01000031.1
tggtataagatcagattatgtgctcgtgattcgcgagttttgaccaaattggtggggggtgtccccttctactaactttagcttccaaatttacttgtaagcaggtgtacctgtaaactgaggggcgctgtcgaaatgagtgatcttatactt

SEQ ID NO: 15358 - RNA, 159 nt, Streptococcus sanguinis
  source 1..159: mol_type = other RNA; note = Related to JAJEOY010000010.1
atacgtatggctagatttttgacttatgattcgtaagtttttaactaagggtagctagattttgcctttcttatcgataaacagaagagaatttttaaattattcaacactgttttatgcagattcgactgcgtcggcatagtgagttgccatacgttt

SEQ ID NO: 15359 - RNA, 153 nt, Streptococcus suis
  source 1..153: mol_type = other RNA; note = Related to NZ_CZFC01000010.1
atacgtatgattagattttgacttatgtttcgtaagtttttatgttaagggtaggagtttttgcctttctattgcttagccgaaaaagtagtcagtttagaatctgctgaaggttaagcagaccgcgtcggcgtaatgagttatcatacgttt

SEQ ID NO: 15360 - RNA, 194 nt, Streptococcus parasuis
  source 1..194: mol_type = other RNA; note = Related to NZ_AP024276.1
gtgcgtatgattagatttttgacttgtgtgttcgcaagaattaacaaaaaggttacacggtgtttagctcactcaagtgccccttcagagaaacgaaagtcaatccattagtggaataaatgtttatagtagtttttaggctattttcggaattattttcatactttcgttcgcgtaagagttttcatacgctt

SEQ ID NO: 15361 - RNA, 193 nt, Streptococcus ovis
  source 1..193: mol_type = other RNA; note = Related to NZ_KB904582.1
ttgcgtatgattagatttttgacttgtgtgttcgcaagtattaacttcaatgttagaagagtgttcagctcactccagtatttccgcttaaggaaatagaatttcagcacctgagaaaattgttttaatagtatctttagctatttcggaattattctagtactgtcgttcgcataggagtaatcatacgctt

SEQ ID NO: 15362 - RNA, 195 nt, Streptococcus henryi
  source 1..195: mol_type = other RNA; note = Related to NZ_AQYA01000033.1
acgcgtatgattagatttttgacttgtgtgttcgcaagtattagcgataatgggtatggtagtgtttagctcactccagtatatctacttagagaaatcgaatgtcagctactaagaaaactgtattagtagaagccgtaaactatttcggaagtatttctttactgtcgttcgcataagagttttcatacgctt

SEQ ID NO: 15363 - RNA, 193 nt, Streptococcus minor
  source 1..193: mol_type = other RNA; note = Related to RQZA01000003.1
atgcgtatgattagatttttgacttgtgtgttcgcaagtattaacttcaatgttagaagagtgttcagctcactccagtatttccgcttaaggaaatagaatttcagcacctgagaaaattgttttaatagtatctataactatttcggaattattcttttactgtcgttcgcataggagtaatcatgcgctt

SEQ ID NO: 15364 - RNA, 167 nt, Streptococcus equinus
  source 1..167: mol_type = other RNA; note = Related to NZ_CP075172.1
atgcgtatgattagatttttgacttgtgtgttcgcaagtattaataacaatgttaggagagcgtttagcgcactttagtacattcttttgaaaacgtatcagtaggataaaaaatcgtggtggttaagagtattactgtcgttttgcgtaagagttttcatacgctt

SEQ ID NO: 15365 - RNA, 194 nt, Streptococcus mutans
  source 1..194: mol_type = other RNA; note = Related to AP010655.1
atgcgtatgattagatttttgacttgtgtgttcgcaagtattaacgacaatgttacgggagcgtttagttcgctccagtatacctttcaaaaaccatagtatacaatcagctgagaaaactttcttagcaatgtctgttgcccggttaggaatgatccatttactgtcgttcacgtaggagttttcatacgctt

SEQ ID NO: 15366 - RNA, 198 nt, Streptococcus constellatus
  source 1..198: mol_type = other RNA; note = Related to CABHMZ010000033.1
ttgcgtatgattagatttttgacttgtgtgttcgcaagtattaacgacaatgttataagagtgtctagctcactccagcattcccgcttaagaggaaggatagggatgactgctgctggaaaaaattcttagtgttatttattttaccattcggaattattctattgctgtcgttcgcctaagagttatcatacgctt

SEQ ID NO: 15367 - RNA, 190 nt, Streptococcus oralis
  source 1..190: mol_type = other RNA; note = Related to NCUE01000019.1
ttgcgcatgattagatttttgacttgtgtgttcgcaagtattaacaaaaatgttactagagtgttcagctcactccagtaatcccaaaactaagacaattaagtttcttctggaaaaagttgcagtatgttttatctctgctgaaggaagatttctatactgtcgttcgcataagagttttcatgcgctt

SEQ ID NO: 15368 - RNA, 190 nt, Streptococcus infantis
  source 1..190: mol_type = other RNA; note = Related to JYGT01000002.1
ttgcgcatgatcagatttttgacttgtgtgttcgcaagtattaacaaaaatgttaccagagtgttcagctcactccagtaatcccaaaactaaggcaaataggcttcttctggaaaaagttgcagtatgttttatctctgctaaaggaagatttctatactgtcgttcgcataagagttttcatgcgctt

SEQ ID NO: 15369 - RNA, 148 nt, Streptococcus sp.
  source 1..148: mol_type = other RNA; note = Related to NTGM02000001.1
ttgcgtatgattagatttttgacttgtgtgttcgcaagtattaacaacaatgttataggagtgtttggcttcatctggtgttattagcttcaggattcattaggatttctactggcaatcttgttcgcgtaagagttatcatacgctt

SEQ ID NO: 15370 - RNA, 190 nt, Streptococcus oralis
  source 1..190: mol_type = other RNA; note = Related to NZ_CP066059.1
ttgcgtatgattagatttttgacttgtgtgttcgcaagtattaacaaaaatgttactagagtgttcagctcactccagtaatcccaaaactaaggcaattagatttcttctggaaaaagttgcagtatgttttatctctgctgaaggaaggtttctatactgtcgttcgcataagagttttcatgcgctt

SEQ ID NO: 15371 - RNA, 193 nt, Streptococcus sanguinis
  source 1..193: mol_type = other RNA; note = Related to NZ_LR134002.1
tagcgcatgattagatttttgacttgtgtgttcgcaagtattaagagcaatgttactagagtgttcagctcactccagtaatttccgacaatagtgacagttagattttttcgagaattattcccaactttcatcaattgaagtcttaggaagatttctatactgtcgttcgcataagagttttcatgcgctt

SEQ ID NO: 15372 - RNA, 193 nt, Streptococcus sanguinis
  source 1..193: mol_type = other RNA; note = Related to CDMW01000001.1
tagcgcatgattagatttttgacttgtgtgttcgcaagtattaagaacaatgttactagagtgttcagctcactccagtcatttccgacaatagtgacagttagattttttcgagaattattccaaactttcatcaattgaagtcttaggaagatttctatactgtcgttcgcataagagttttcatgcgctt

SEQ ID NO: 15373 - RNA, 183 nt, Streptococcus salivarius
  source 1..183: mol_type = other RNA; note = Related to NZ_OU540596.1
aagcgtatgattagatttttgacttgtgattcgcaagtaataatgaaaatgtgttgaaggtgtttagctcctccagtatatttcctattaagaaaaaatgaaaaagttcaggtgacttaaatgacatcagctgaaaagttggtatctgtatactgtcgtccgcgtaagagttttcatacgctt

SEQ ID NO: 15374 - RNA, 202 nt, Streptococcus hillyeri
  source 1..202: mol_type = other RNA; note = Related to NZ_RCVM01000028.1
ctgcgtatgattagatttttgacttgtgtgatcgcaagtattaacattaatgttagctgaaagttagctcactccagtatattctttgagagaattaaagttatctgctgagtgaaaatcgaagtgaaatgactggttaaggaaagctaagtaatttggtaatattctatactgtcgttcgcgtaagagttatcatacgctt

SEQ ID NO: 15375 - RNA, 195 nt, Streptococcus agalactiae
  source 1..195: mol_type = other RNA; note = Related to LR134265.1
atgcgtgtgaatagatttttgacttgtgtgttcgcaagtattaacaataatgttacaagagcgttttgctccctccagtagtcaataatgttcaattcgacaattgctgctgatgaatgataaactacatcaataggctgaactaattggctatatctgttttactgtcgttcgcttgagagttttcacacgctt

SEQ ID NO: 15376 - RNA, 164 nt, Streptococcus orisasini
  source 1..164: mol_type = other RNA; note = Related to NZ_BCLE01000009.1
atgcgtgtgactagatttttgacttgtgtgttcgcaagtattaacaacaaaggttggaatactttttcagcctctaatatctcaccaggaagactttcagctgagaaaacatctgtacttcccttaggccaactgcttttcgcataatgagttgtcacacgctt

SEQ ID NO: 15377 - RNA, 143 nt, Holdemanella biformis
  source 1..143: mol_type = other RNA; note = Related to QSGD01000014.1
tagcacatgattagatatttggcttgtgtttcgcaagctttgaaaaaaatggtagcaaggttagcgattattctttacgcttaattactccttatttacttttattgtctttatttcaacgcataatgagtagtcatgtgctt

SEQ ID NO: 15378 - RNA, 132 nt, Streptococcus gordonii
  source 1..132: mol_type = other RNA; note = Related to RJOU01000001.1
gtgtgcatggctagatttttaacttgtgattcgcaagtaattaaagtaatgttatatgagtcttttagcatatagtatagctagacttaggtcagacatactaagcaacgcataatgagttgccatgcactt

SEQ ID NO: 15379 - RNA, 135 nt, Macrococcus equipercicus
  source 1..135: mol_type = other RNA; note = Related to NZ_SCWC02000010.1
tatcatgtggctagatttttggtatgtgcttcgcataccttgaaaagaaaggcagggacatttgttacctgtacgcatcatcatctagtgggatagttggcaattggtataaacataatgagtagccacatgact

SEQ ID NO: 15380 - RNA, 143 nt, Veillonella sp.
  source 1..143: mol_type = other RNA; note = Related to JAHAAI010000002.1
tagcgtatggttagattttttgcttgtgcttcacaagtattgatttatttatgaaggatgggagttttttctctctctgataaattctttagtaaatacattgggaatatcatgtgtttgagataaagagtaaccatacgctg

SEQ ID NO: 15381 - RNA, 156 nt, Veillonella parvula
  source 1..156: mol_type = other RNA; note = Related to JAHAFZ010000010.1
tagcgtatggttagattttttacttgtgcttcacaagtgttgatataaatgttaggactcttatgtctctagagataatcttttatagatacagatgaattctttagtttaatacttttgtatttagacttttatataaagagtaaccatacgctt

SEQ ID NO: 15382 - RNA, 137 nt, Peptoniphilus sp.
  source 1..137: mol_type = other RNA; note = Related to AWXD01000007.1
tagcgtgtggttagagtttttgcttgtgtttcgcaagcgttgatttaaatgtgaggtctgtttgtctcgctcgtcaattcctttttatttatatatgatttttgtatgaatttgacataaagagtaaccacacgctt

SEQ ID NO: 15383 - RNA, 135 nt, Veillonella parvula
  source 1..135: mol_type = other RNA; note = Related to NZ_ADFU01000011.1
tagcgtatggttagagtttttgcttgtggttcgcaagcgttgaatttaatgtgagagttgctttcagctctcgatgattctttaataatttcatgtacacatgatgaatttgagataaagagtaaccatacgctt

SEQ ID NO: 15384 - RNA, 132 nt, Anaerosphaera sp.
  source 1..132: mol_type = other RNA; note = Related to LTGD01000005.1
tagcgtatggttagattttttgcatgtgattcacatgcgttgtatttaatgttaggagcattagtcactaacaaacccattcataataatataagttatacttagatcgacctaaggagtaaccatatgctt

SEQ ID NO: 15385 - RNA, 136 nt, Bulleidia extructa
  source 1..136: mol_type = other RNA; note = Related to NZ_ADFR01000009.1
gggcgtatggttagattttttacttgtgtttcacaagtgttgatttcaatgtgagatagataggtctttcaataaacctttgaaatgtatactgtaagttcagtatgctaataacctaatgagtaaccatacgtct

SEQ ID NO: 15386 - RNA, 151 nt, Peptostreptococcus stomatis
  source 1..151: mol_type = other RNA; note = Related to JAEUGG010000004.1
ttgcgtatagctagatcttttacttgtgtttcgcaagtgttgcatttaatggttgatagattagccacacttaaactttttttccttctttcatttttttctttttttcctgaaaagatgaatgactggcataatgagtagctatacgctt

SEQ ID NO: 15387 - RNA, 151 nt, Mogibacterium diversum
  source 1..151: mol_type = other RNA; note = Related to JABZQL010000055.1
aagcgtatagctagattttttacttgtggttcgcaagtagttttgtaaatggaacggggtttagcgatatccttgattcaaattttatcattaaagaaaaaatagtatgattgcatcaatgcttaattgcataatgagtagctatacgcat

SEQ ID NO: 15388 - RNA, 130 nt, Coprococcus sp.
  source 1..130: mol_type = other RNA; note = Related to MNSF01000070.1
aggcgcatcgttagatttttgagttgtgtttcgcaattcttggtgaaaacggtagggagacttgccacccaataaaggatatatgcctgttttacccttattatagggcataatgagtagcgatgcgcct

SEQ ID NO: 15389 - RNA, 144 nt, Clostridium sp.
  source 1..144: mol_type = other RNA; note = Related to FMEJ01000011.1
ttgtgcacggttagattttttactcatgtttcgtgagtattgacaagaacggtacgatatgtgctctttacgcgtctcccgaacactcacgctatacttttgggagattacgggttacactgcctaaagagtaaccgtgcacaa

SEQ ID NO: 15390 - RNA, 143 nt, Streptococcus suis
  source 1..143: mol_type = other RNA; note = Related to FIHB01000001.1
cgacatataactagaatttattgtttgtgtatccgcaaatagtgataaaattagctgggtaactagtcttgtttcttgcaactgaaaagtaacttatacttacaaaggctcgcaagactcgcatattgagtagttatatgtct

SEQ ID NO: 15391 - RNA, 143 nt, Streptococcus macacae
  source 1..143: mol_type = other RNA; note = Related to NZ_UHFV01000002.1
taacgtataactagaatttattgtttgtgtatccgtaaacaatgataaagtgaactgggcggctagtttgatttattgcaccggctgagaaatcgcttttatcaacgctcgacaagtctcgcataatgagtagttatatgttt

SEQ ID NO: 15392 - RNA, 141 nt, Streptococcus sanguinis
  source 1..141: mol_type = other RNA; note = Related to NZ_GL878548.1
tgacatataactagaatttattgtttgtgtatccgcaaattgtgatgaagtcaactgggtaactagtttaagatttcgcctgttgagaagcttgttcagaaaatgctcaacaagtctcgcatagtgagtagttatatgttt

SEQ ID NO: 15393 - RNA, 142 nt, unidentified
  source 1..142: mol_type = other RNA; note = Related to JAGZSC010000015.1; note = Clostridiaceae bacterium
ttgcgtgtggttggattatttggcttgtgtttcgcaagttttgacaaaaatggtgggaatgtacaccactctctatgttcagactggaggggcttcttaatatagtagttctcgaatggtgttaatgagcaaccacacgcct

SEQ ID NO: 15394 - RNA, 152 nt, Ruminococcus sp.
  source 1..152: mol_type = other RNA; note = Related to JAFUUI010000025.1
gagcgtatgacaagattgttgtgctgtgcttcgcagtatcttgatgctatgtcagggcatccacgctttcgggcgtctctacagtacctataacaatttctgtattatttattgttatataccttttccgcctaatgagttgtcatgcgctc

SEQ ID NO: 15395 - RNA, 134 nt, Anaerostipes hadrus
  source 1..134: mol_type = other RNA; note = Related to NZ_WQRC01000021.1
caacgtgtagttagattttgtgcttgtgtttcgcaagtattggcaaaaatggtaggaacatatgcgttcttttactatttaattagtcttggttagatgaacttagacaccgcataatgagtaactacacgtta

SEQ ID NO: 15396 - RNA, 139 nt, unidentified
  source 1..139: mol_type = other RNA; note = Related to JAGZGD010000017.1; note = Lachnospiraceae bacterium
caacgtgtagttagattttgtacttgtgtttcgcaagtgttggtaaaaatggtagggagatatgcgttctcttacttttttaactatgatgtattgcagagtagtctttaagcatcgcataatgagtaactacacgtta

SEQ ID NO: 15397 - RNA, 133 nt, Butyrivibrio fibrisolvens
  source 1..133: mol_type = other RNA; note = Related to NZ_AUJA01000011.1
aagcgtgtgattagaattttggcttgtgaatcgcaagttttattattaatgttaggatcgcgtgctatttttatcgcatagttagtacatcttttgttaatatataatctgcataaggagtaatcacacgcat

SEQ ID NO: 15398 - RNA, 130 nt, unidentified
  source 1..130: mol_type = other RNA; note = Related to KE159810.1; note = Lachnospiraceae bacterium 10-1
atgcgtgtggctagatttttggcctgtgtatcgcaggctttgatgaaaatgtcagggacatctgcgccccggtatataatactctgttaacctgtatcttataatcggcaaaaggagtagccacacgcat

SEQ ID NO: 15399 - RNA, 159 nt, Lactococcus lactis
  source 1..159: mol_type = other RNA; note = Related to JRFX01000003.1
tagcacacaactagactctttgatatgtgtttcgcatatcttgacaacaatggtggaagtttcagcatatacactacatcagtctattcaaagtattcatcggcactgtaagcaaatgtgccacgatgtcgctattcgcataatggtggttgtgtgcgt

SEQ ID NO: 15400 - RNA, 135 nt, Lactococcus lactis
  source 1..135: mol_type = other RNA; note = Related to NZ_JADPDD010000032.1
tagcatacaactagaccctttgatttgtgtttcgcaaatctgtaaacaaatggtggaaacatcagcatttttatgagtataattgccgttaaggtgtgggcaattgtcgctgcgcatattggtggttgtatgcgt

SEQ ID NO: 15401 - RNA, 143 nt, Leuconostoc citreum
  source 1..143: mol_type = other RNA; note = Related to BJJW01000002.1
atagtcaaggttggatttttgccctttgaatcgaggggctttacaaaaatggtgggaacattcattgcggtaattttgccaacagggtaacattgctgagctttcacacgttctgtggctgaacaatgagctgccttggcttt

SEQ ID NO: 15402 - RNA, 138 nt, Leuconostoc gelidum
  source 1..138: mol_type = other RNA; note = Related to FN822744.1
atagtcaaggttggattttcaccctttgaatcgaggggttttacaacaatggtagtaacattcattacgggttcattgccgaagggtaatgttgccgatgttgtttacactttgtgaacaatgagctgccttggcttt

SEQ ID NO: 15403 - RNA, 158 nt, Exiguobacterium acetylicum
  source 1..158: mol_type = other RNA; note = Related to LFQN01000005.1
atatgtgtggtcagattttttacttgtgtttcgcaagtattgaaaaaaatggtagggagaatagctcgtatatatcccgatttttctcttagttttctcctggttttcccttttatctacgtgtgactcagcggcgcctaaagagtgaccacacataa

SEQ ID NO: 15404 - RNA, 132 nt, Eubacterium sp.
  source 1..132: mol_type = other RNA; note = Related to DPHU01000079.1
taatgtgtggttagattttgggcctgcgtatcgaaggcattgattaaaatggtgggaacactcgcgatttattatattttttatatctctttatggagacttagttttagcataatgagtaaccacacattt

SEQ ID NO: 15405 - RNA, 134 nt, Streptococcus agalactiae
  source 1..134: mol_type = other RNA; note = Related to LBLH01000065.1
aagcgtatgaacagattttatggcttagcgattcgtaagcctttaactacctagttaggtcctgtagcatagtccatgttggccgtattgatgactttcatgttgccttttgcttaatgagttttcatacgctt

SEQ ID NO: 15406 - RNA, 125 nt, Streptococcus parasanguinis
  source 1..125: mol_type = other RNA; note = Related to NZ_JALDUR010000001.1
atgcgtatgaatagattttatggcttagcggttcgtaagcctttctctcattagtggggggatttagcaagtatctgtatacttgacttgttcgtagcgattgcgtaatgagttttcatacgctt

SEQ ID NO: 15407 - RNA, 132 nt, Streptococcus sp.
  source 1..132: mol_type = other RNA; note = Related to UHFT01000001.1
atgcgtatgaacagattctatggcttagcgtttcgtaagcctttctccctctagcagggagctatagcaagttactttagctgcctagttgacttgtctgttgccttttgcgtaatgagttttcatacgctt

SEQ ID NO: 15408 - RNA, 146 nt, Lachnoanaerobaculum sp.
  source 1..146: mol_type = other RNA; note = Related to JAGEKB010000001.1
aggcgtatgaaaagattttgtggcttagcgtttcgtaagcctttataataatgttaggaataattatcgtagtccatattatgttttgtttttttggaattctaactgatatacatggttgtaacataatgagttttcatacgcct

SEQ ID NO: 15409 - RNA, 146 nt, Lachnoanaerobaculum sp.
  source 1..146: mol_type = other RNA; note = Related to JABZPB010000073.1
aagcgtatgaaaagattttttggcttagcgtatcgtaagcctttgtaaccatgttagaggtcatggtcgtattctatataatatattgttttttatgtatcctaaagcatagctaccaatataacataaggagttttcatacgctt

SEQ ID NO: 15410 - RNA, 134 nt, Streptococcus cristatus
  source 1..134: mol_type = other RNA; note = Related to VKGS01000001.1
ctacgtatgacaagatttttgacttagcgcttcgtaagtctttctatcaacggtaggagcgttgctttatactgtctttgtcagtatctgttggcatgtttattgctatacgcgtaatgagttgtcatacgttt

SEQ ID NO: 15411 - RNA, 146 nt, Granulicatella sp.
  source 1..146: mol_type = other RNA; note = Related to NZ_KV790849.1
atgcgtatgaaaagattttatggcttagcgtttcgtaagccttcaaaacattagtgggagatgctagcgcaagtactacttcatccaccttatgaacagctaatttgctgtcactgttgctttgcataatgagttttcatacgctt

SEQ ID NO: 15412 - RNA, 134 nt, Staphylococcus aureus
  source 1..134: mol_type = other RNA; note = Related to NZ_UHCA01000002.1
tgtcgtgtggttagattttttgcacgagtttctcgtgtgttgacaaaaatgttgataacattagttttgtttcataattttccgataatcttttgcgtttatagtttttgaacataatgagtaaccacacgatg

SEQ ID NO: 15413 - RNA, 127 nt, Salinicoccus roseus
  source 1..127: mol_type = other RNA; note = Related to JAIMFU010000001.1
aatcgtgtggttagagatttcacatgatgtttctcatgtgttgattgtaatggtagagaaattactcgccgtttaaacactcgtatactgctcgtatataaaatgcacaatgagtaaccacacgatt

SEQ ID NO: 15414 - RNA, 133 nt, Staphylococcus hominis
  source 1..133: mol_type = other RNA; note = Related to NZ_VELK01000002.1
aaatgcatggctagattttttacttgtgtttcgcaagtatttataaaattgttggcggatttgcatattgtcaactatttacattttcttaatttgtgttgtacttaatagcctaatgagtagccatgcataa

SEQ ID NO: 15415 - RNA, 131 nt, Staphylococcus simulans
  source 1..131: mol_type = other RNA; note = Related to NZ_CP023497.1
tagcgcatggctagaatttttgcttgtgtttcgcaagcatttatcgaattgctggcgatatttgcttttagtcagctttacattttcgttctacatttccactaaacagcctaatgagtagccatgcgtat

SEQ ID NO: 15416 - RNA, 131 nt, Mammaliicoccus sciuri
  source 1..131: mol_type = other RNA; note = Related to JALGOX010000003.1
aagcgcatggctagaatttttacttgtgtttcgcaagtgtttataggattgttagtaggtttgcatatatgtaaattttctcgttagaattttgcttcgacgtttacagccaaatgagtagccatgcgtat

SEQ ID NO: 15417 - RNA, 128 nt, Staphylococcus pasteuri
  source 1..128: mol_type = other RNA; note = Related to CP068216.1
atgcgtatggctagaatgtttacttgtgtttcgcaagtatttatatgaaagtccatggattttcattgttttaattttcttttctatttttgcacttaatttctagactaatgagtagccatacgtat

SEQ ID NO: 15418 - RNA, 132 nt, Staphylococcus warneri
  source 1..132: mol_type = other RNA; note = Related to PZEX01000047.1
ttatgcatggctagaaattttgcttgtgtttcgcaagcatttatataattgttagggagatttgcatattgctaacttttcatttattttcagaattttatattcaattgccaaatgagtagccatgcattc

SEQ ID NO: 15419 - RNA, 131 nt, Macrococcus goetzii
  source 1..131: mol_type = other RNA; note = Related to NZ_MJBI02000011.1
atgcgtatggctagaatttttacttgtgcttcgcaagtgtttataaaattgtatgtgagatagcttcttatcaattgtccattcgattatgaattatccttttataatgcctaatgagtagccatacgcat

SEQ ID NO: 15420 - RNA, 179 nt, Kandleria vitulina
  source 1..179: mol_type = other RNA; note = Related to NZ_JQBL01000009.1
atgcgcatgattagatcttttgactcatgaatcgtgagtcttggcggaaagggtactcgacgactgtttaaataatttttaatattatgctttatagcacgccctttcagaatatatttataagcactttttagaatattcacgtgttttgttgttttataatgagttatcatgcgctt

SEQ ID NO: 15421 - RNA, 142 nt, Acinetobacter nosocomialis
  source 1..142: mol_type = other RNA; note = Related to CP077398.1
tgtcctttgggaagatttttagattgcgtatcgcattctgttttgaaaatgtcagtggcttattgtcaaatttgccaaccaattattgggcaccctgctaaccatgctgttgtgcgttgaccatatgagttcccaaggggca

SEQ ID NO: 15422 - RNA, 142 nt, Acinetobacter baumannii
  source 1..142: mol_type = other RNA; note = Related to CP059039.1
tgccctttgggaagatttttagattgcgtatcgcattctgttttgaaaatgttaatggcttattgtcaaattagccaaccagtcattgggcactctgctaaccatgctgctgtgcgttgaccatatgagttcccaaggggca

SEQ ID NO: 15423 - RNA, 141 nt, Acinetobacter colistiniresistens
  source 1..141: mol_type = other RNA; note = Related to KB850198.1
tgccccttgggaagatttttagattgcgtatcgcaatctgttttgaaaatgttaatggcttattgtcaaatttgccggtatgtattggttacgccgctaagtatactcttgtgcgatgaccatatgagttcccaaggggta

SEQ ID NO: 15424 - RNA, 141 nt, Acinetobacter sp.
  source 1..141: mol_type = other RNA; note = Related to JAKZGD010000010.1
cgctccttgggaagatttttagattgcgtatcgcaatctgttttgaaaatgttaatggcttattgtcaaatttgccgatatgtattggttacgccgctaagtatactcttgtgcgatgaccatatgagttcccaaggggta

SEQ ID NO: 15425 - RNA, 142 nt, Acinetobacter indicus
  source 1..142: mol_type = other RNA; note = Related to NZ_CP039031.1
tgccctttgggaagatttttagattgcgtatcgcagtctgttttgaaaatgtgaacggcttatgtctgaactcttgccgacgctacacttgtgctgtgcggttttttccccgtactgtgaccatatgagttcccaaggggca

SEQ ID NO: 15426 - RNA, 144 nt, Acinetobacter lwoffii
  source 1..144: mol_type = other RNA; note = Related to NZ_CP054822.1
cgccctttgggaagatttttagattgcgtatcgcagtctgttttgaaaatgtgagaggcgtattgtccaatgcttgccgatactatactttgtgctgaacagttggctctgctgtactgtgaccatatgagttcccaaggggca

SEQ ID NO: 15427 - RNA, 143 nt, Acinetobacter sp.
  source 1..143: mol_type = other RNA; note = Related to NEGA01000008.1
agccctttgggaagatttttagattgcgtatcgcagtctgttttgaaaatgtgaaaggcgtattgtcaaatttgccaatgttatgttgtgtgctgttactggtagtgccgctgtgctgtgaccatatgagttcccaaggggca

SEQ ID NO: 15428 - RNA, 141 nt, Acinetobacter sp.
  source 1..141: mol_type = other RNA; note = Related to SGSS01000016.1
tacctcttgggaagatttttagattgcgtatcgcagtctgttttgaaaatgttaatggcttattgtcaaatttgccaaccagttttgggcactctgctaaccatgctgatgtgcgttgaccatatgagttcccaaggggta

SEQ ID NO: 15429 - RNA, 136 nt, Acinetobacter nosocomialis
  source 1..136: mol_type = other RNA; note = Related to JAGJSX010000002.1
atatcggtgattagaaattgagttgtgtatcacaacttgctgactaatgttagcagaactgcttaactacgtacgaccttttaatggttgaactttgataaataactggtgtcgccatttgagttttcaccgatat

SEQ ID NO: 15430 - RNA, 132 nt, Acinetobacter sp.
  source 1..132: mol_type = other RNA; note = Related to NZ_VOZD01000001.1
atatcggtgattagaaattgagttgtgtatcacaacttgctgactaatgttagcagaactgcttaactacgtacgaccttaatggttgaactttgataaaactggtgtcgccatttgagttttcaccgatat

SEQ ID NO: 15431 - RNA, 177 nt, Acinetobacter kookii
  source 1..177: mol_type = other RNA; note = Related to NZ_FMYO01000016.1
ctatctgtgaatagattcatggattgtgtttcgcaatctgatttctaagggtcaggacatgagctaacttatgtcttcctgaaatttctttcgtataagaaggattttaataattccttgaggctttctctcttttgagaatgcttgatggttcgccataagagttttcacagatag

SEQ ID NO: 15432 - RNA, 181 nt, Acinetobacter sp.
  source 1..181: mol_type = other RNA; note = Related to NZ_CP032279.1
ctatctgtgaatagattcatggattgtgtttcgcaatctgatttctaagggtcaggtaatgagctaaaatttattatcttcttagattttttcttaatagaaattttttatacttatttgaggctttcttcttttcttggagattgcttaggttatacgccataagagttttcacagatag

SEQ ID NO: 15433 - RNA, 143 nt, Psychrobacter salsus
  source 1..143: mol_type = other RNA; note = Related to NZ_CAJHAW010000011.1
tcccttctgggaagattattgggatgcgtatcgcaacctgttctgaaaatgtaagagtttctgtctgattcctgtaaggattctgatagttctaatggtgtctatagtatctgtactgtgaccacatgagttcccagaaggaa

SEQ ID NO: 15434 - RNA, 144 nt, Psychrobacter immobilis
  source 1..144: mol_type = other RNA; note = Related to NZ_CAJGZW010000014.1
tgccctctgggaagattattagattgcgtatcgcaatctgttttgagaatgtaaggtcttatgtctgattacgcctacggtaatctgatactgctataggtatctaaaatattgtacggtgaccatatgagttcccagagggtt

SEQ ID NO: 15435 - RNA, 139 nt, Acinetobacter baumannii
  source 1..139: mol_type = other RNA; note = Related to AAYLMD010000006.1
tgtcctttgagaagatatttggatagcgaatcgctatctattttattaagattggaatccaatctgtcgaaatctcttgaagtgagctataatttcttaaagttatgctctgataagaccagtgagttctcaaaggaca

SEQ ID NO: 15436 - RNA, 140 nt, Acinetobacter baumannii
  source 1..140: mol_type = other RNA; note = Related to JEWN01000001.1
tgtcctttggaaagatctttaaatagcgtatcgctatttgttttgaaattgggcttaggctcttcttttgtccagcaatactttgcggtcagtgcttagtcactctgcacggttgttgaccattgagtttccaaaggaca

SEQ ID NO: 15437 - RNA, 123 nt, Acinetobacter baumannii
  source 1..123: mol_type = other RNA; note = Related to NZ_VTRF01000001.1
gcacctatggaaagatttatgattgtgattcgcaattatgtatctaatgttaaggcactatgacaagttaccttaagataacctttaaaacgtactagaagtccatgaagtttccataggtgc

SEQ ID NO: 15438 - RNA, 124 nt, Acinetobacter ursingii
  source 1..124: mol_type = other RNA; note = Related to NZ_BKVP01000163.1
gcacctatggaaagatttatgattgtgattcgcaatcatgtatctgatgttaagacacaatagttgtaacgttagagtataacctataagacgtactagaagtccatgaagtttccataggtgt

SEQ ID NO: 15439 - RNA, 124 nt, Acinetobacter bereziniae
  source 1..124: mol_type = other RNA; note = Related to JADVON010000009.1
gcacctatggaaagatttatgattgtgattcgcaattatgtatctaatgttaaggcacaatgtagagtaaccttggcataacctttaaaacgtactggtaagtccatgaagtttccataggtgc

SEQ ID NO: 15440 - RNA, 124 nt, Acinetobacter sp.
  source 1..124: mol_type = other RNA; note = Related to SJOH01000014.1
gcacctatggaaagatttatgattgtgattcgcaatcatgtatctaatgttaagacacaatgtaatgtaaacttagtataacctttagaacgtactaggtagtccatgaagtttccataggtgc

SEQ ID NO: 15441 - RNA, 122 nt, Acinetobacter sp.
  source 1..122: mol_type = other RNA; note = Related to SJOG01000001.1
gcacctatggaaagatttatgattgtgattcgcaatcatgtatttaatgttaaggcactttgacgatagccctaatataatcggtgaaacgtactggtagtccataaagtttccataggtgc

SEQ ID NO: 15442 - RNA, 153 nt, Necropsobacter sp.
  source 1..153: mol_type = other RNA; note = Related to NZ_LN776178.1
gtgggtataagcagattttttgctttgtttcggagcaagtattgataatattggcgtaattgttaataattattgtaccatctaataaatttagattttaaactattttaatagcttagctagctaacatcacataagagtgcttgtacccac

SEQ ID NO: 15443 - RNA, 159 nt, Pasteurella multocida
  source 1..159: mol_type = other RNA; note = Related to PPWW01000004.1
gtgaatataagcagaacattttactttgtttcggagtaagaattaatcatgtagcaatcagttttattgcttacattatctattaacttaatgtagttattacaaataaaacattaagtagcatcctcagaggaatcgcataagagtgcttatattcac

SEQ ID NO: 15444 - RNA, 151 nt, Haemophilus parainfluenzae
  source 1..151: mol_type = other RNA; note = Related to NZ_CP031477.1
gtggatataagcagattttttgctttgtttcggagcaagtattaataatattggtgttgctaccactgttatctcatattttaaccactaagaaatgtagtagatttatatctagatagcatggctataacgtaagagtgcttatattcac

SEQ ID NO: 15445 - RNA, 136 nt, Aggregatibacter sp.
  source 1..136: mol_type = other RNA; note = Related to NZ_CP072548.1
gtgggtgtgaatagaatttttgctttgtttcgaagtaactattaacaaagtccggtggattttgtatatttaactgcataattatcatgatattagtagcttaatatataagtcactaatgagttttcacacccac

SEQ ID NO: 15446 - RNA, 131 nt, Rodentibacter trehalosifermentans
  source 1..131: mol_type = other RNA; note = Related to MLHL01000009.1
gtgggtatagatagatttttcacttttgtttctgaagtggttacataaaatgtcaagagttgatgtatataattatcgtagtattttaatacttcgattacttagcattactaatgagtatctatacccac

SEQ ID NO: 15447 - RNA, 130 nt, Lonepinella koalarum
  source 1..130: mol_type = other RNA; note = Related to VSFH01000001.1
gtaggtataaatagatttttcacttttgtttctgaagtggtttcaaaaaatatcaagacttgatgtgatgattatcttagtagataaaatactaagaggatttagcatactaatgagtatttatacctac

SEQ ID NO: 15448 - RNA, 130 nt, Haemophilus haemolyticus
  source 1..130: mol_type = other RNA; note = Related to NZ_JTLX01000008.1
gcaggtataaatagatttttcacttttgtttcaggagtggttttaaataatgtcaggaattgatgctgataatattgtaagtactaagaagtttagtagattaaacttgccaatgagtatttatacctgc

SEQ ID NO: 15449 - RNA, 138 nt, Neisseria mucosa
  source 1..138: mol_type = other RNA; note = Related to JQHF01000020.1
gcggctacaaacagatgttttgcccttgtttcggggtgactataaacaatgtcagggcttcatgtatccctgttccatactcgattctattgtttatgagcagtagtattgtttttaccaaagagtgtttgtagccgt

SEQ ID NO: 15450 - RNA, 138 nt, Kingella potus
  source 1..138: mol_type = other RNA; note = Related to CP091516.1
tgaggcataaatagatttgttatcctgattcgggataatttaaaacaatgtaccaagggtaacgcgcctcgtgcagtctgcacttgtcgctaattactccatattttgtttgacttcagtgagagtatttatgcctct

SEQ ID NO: 15451 - RNA, 149 nt, Lactococcus lactis
  source 1..149: mol_type = other RNA; note = Related to NZ_CP042408.1
taggataataatagattatatgtggggtatccccataagttataaaaatgtttgaagggtttcggctcaaatatctgctattaggcgtataagtaattggcaatcatagcttatacggcattcgctacgctcaggagtattctatccat

SEQ ID NO: 15452 - RNA, 127 nt, Dickeya sp.
  source 1..127: mol_type = other RNA; note = Related to NZ_CM001979.1
agggctataggcagattttttatcacgaagcgtgatatgtgaaaagaatgtccggcggaatgccatcaatgttttaagatcaccgataacagtttgccggtgagcttaatgagtgcctatagcacct

SEQ ID NO: 15453 - RNA, 126 nt, Pantoea vagans
  source 1..126: mol_type = other RNA; note = Related to CP011427.1
agggctataggcagatcttttatcacgaagcgtgatatgtgaaaaaaatgtccggcggaatgctatcaatgtgttcaggttgccgataatgggcggccgttgtgcttaatgagtgcctatagttcc

SEQ ID NO: 15454 - RNA, 128 nt, Salmonella enterica
  source 1..128: mol_type = other RNA; note = Related to ABDODY010000002.1
agggctataggcagattttttgtcacgaagcgtgatatatgaaaaaaatgtccggtggaatgccgatcaaagtgttaagtaatctgatgaccagattgcaaatgagcttaatgagtgcctatagttcc

SEQ ID NO: 15455 - RNA, 128 nt, Enterobacter hormaechei
  source 1..128: mol_type = other RNA; note = Related to JAJKGJ010000001.1
agggctataggcagattttttgtcacgaagcgtgatatatgaaaagaacgtccggtggattgccgatcaaagtgttaagttacttgatgattagattgcaaatgagcttaatgagtgcctatagaccc

SEQ ID NO: 15456 - RNA, 124 nt, Yersinia enterocolitica
  source 1..124: mol_type = other RNA; note = Related to NZ_CTIT01000003.1
gggtctataggtagattttttatcgcgaagcgcgatatgtgaaaacaacgttgggtagattgccactgtaaagtgatgcaccagtagtaatggtctgcatagcataatgagtgcctataggccc

SEQ ID NO: 15457 - RNA, 141 nt, Brachyspira pilosicoli
  source 1..141: mol_type = other RNA; note = Related to SAXY01000032.1
aagcttacagatagatatttcatgttgcatttcgcatgagaagatttattatagcaagagtttttcagtatatagctatatatctgtttatttttttgcaccaagcttggtgcggttttacttaagagtatctgtaagctt

SEQ ID NO: 15458 - RNA, 140 nt, Brachyspira aalborgi
  source 1..140: mol_type = other RNA; note = Related to NZ_SAXU01000001.1
tagcttacagatagatttttcctgttgatttcgcaggagatgatttattatagggttagtgtttaagtaaaaatgctgctttttctttattccatatactgtgcacagtatatgtcttacataagagtatctgtaagctt

SEQ ID NO: 15459 - RNA, 139 nt, Brachyspira hyodysenteriae
  source 1..139: mol_type = other RNA; note = Related to NZ_CP019600.1
tggcttgcagatagatttttcaggcgaatcgcttgaggagatttattgtatcgtcaggttttaggacattaaacttcattttttgtcgttggtacatatatatatgtactacacttgtcccgtgagtatctgcaagtca

SEQ ID NO: 15460 - RNA, 136 nt, Brachyspira aalborgi
  source 1..136: mol_type = other RNA; note = Related to SAXX01000003.1
aagcttgcagatagatttttcttgtcgtttcgcaagaggagattttttgtatcatcactttttaggactgtctgtttgtatatgtatatacagaaagaccttgaaaatttatcgtcccgagagtatctgcaagcca

SEQ ID NO: 15461 - RNA, 161 nt, Bacillus sp.
  source 1..161: mol_type = other RNA; note = Related to LITP01000001.1
ttaggcaagcaaggaacagttgaacttttgatggtggtaatcgctatcttataattaaatgtatctacagatcttcacgctctattctagttgtttatcgaattgtcatatggtatcaacggtatgatttagaaaggtagaactgtacttgtttgcctact

SEQ ID NO: 15462 - RNA, 154 nt, Paenibacillus tritici
  source 1..154: mol_type = other RNA; note = Related to JABMKX010000008.1
acaagttgtatttgaacttttgatggtgataatcgctatcttatattttaatgtatctacacatctctctgcactattctcattgttggatccaattgtctcacatggtatctacgcggtgatttagaaaggtagaaatgcagcattacttttg

SEQ ID NO: 15463 - RNA, 162 nt, Paenibacillus sp.
  source 1..162: mol_type = other RNA; note = Related to NZ_FCOQ01000017.1
ataggcaggcaagttgcagttgaacttctggtagtgctaatcgctatcttataaaaagaatgtaactacatatcctacgcgcaattttcagtatttatctaaatgtcgcaatggtttcaacggtatgatttagaaaggtagaactgcacttgtttgcctact

SEQ ID NO: 15464 - RNA, 163 nt, Paenibacillus tarimensis
  source 1..163: mol_type = other RNA; note = Related to NZ_JAKGAO010000024.1
ttaggcaagcaagatgcagttgacttttggatggtgataatcgctatccaacaacctaaggtaactacgtatcgctatgtactactcgcgctgtttatcgaattgtctcacttggtatcaccggagtaatttagaaaggtagaactgcacttgtttgcctact

SEQ ID NO: 15465 - RNA, 164 nt, Bacillus sp.
  source 1..164: mol_type = other RNA; note = Related to NZ_CP033906.1
tttggcaagcatgaggtaattttaattttaggttgtgaaatcgcaacccgaatatttaatgtattatttatctgcgtcacttttacgtattttctacttttagctaatcgcgtataattttctatttaatttagaaaggtagaatttatccatgcttgcctaag

SEQ ID NO: 15466 - RNA, 156 nt, Bacillus amyloliquefaciens
  source 1..156: mol_type = other RNA; note = Related to NZ_CP082279.1
acagcaagggtaagaaaaaattgactttatggcggtgaaatcgccgtctgttatttaaagggtatacttaatttacacgcttattttatcttcgaagttttattcgatttgtctaatcgctattaggagaagggtagaattttaacccttgctgtt

SEQ ID NO: 15467 - RNA, 159 nt, Bacillus altitudinis
  source 1..159: mol_type = other RNA; note = Related to CP018574.1
tagcagcaagggtgagaaatttattttatggcggtgaaatcgccgtctgttattttaaagtatatactaaatatgcacgcttattttatcttataaggttttatacgatttttctaaacgctattaggagaagggtagaattttaacccttgctgttgt

SEQ ID NO: 15468 - RNA, 146 nt, Sporosarcina sp.
  source 1..146: mol_type = other RNA; note = Related to PDYK01000012.1
tggggaagtagggaacaatttacattcgcggtgataatcgctgcgtcttatataaatgtatgatttactcacgtgtatcttatattgttttccgcgtcgtctatgtcggggtaactagaacggtagaattatccctactcccctct

SEQ ID NO: 15469 - RNA, 136 nt, Macrococcus canis
  source 1..136: mol_type = other RNA; note = Related to NZ_CP047363.1
tgagggaagttgaatttaaagttgtgtaactgcgacttatgctttcaatgtttctatagcgttatcgctatatatatactatgtttattttccatttagaaaatattgtaatcgaaaacggtagaacttccctctt

SEQ ID NO: 15470 - RNA, 155 nt, Brevibacillus parabrevis
  source 1..155: mol_type = other RNA; note = Related to NZ_RHHV01000019.1
attggggtaggggtattaattgatttccactgttgtaattgcggtggtctataggaatgtcagtagcacattccgttgtactagttaactttatcgcgtaaattgttttatctgtatcgcgctaattaataaggtagaattaaccctcccctttc

SEQ ID NO: 15471 - RNA, 156 nt, Paenibacillus xylanexedens
  source 1..156: mol_type = other RNA; note = Related to NZ_VDZO01000006.1
atacggggaagggaagtaattgatttccactgttgttactgcggtggtttatagcaatgttaggcacacattttccgatgtctcgctatttttatttgtctcgttaaattttccctactagtaatttaatgaagtagaattccccttcccctcttc

SEQ ID NO: 15472 - RNA, 155 nt, Paenibacillus lautus
  source 1..155: mol_type = other RNA; note = Related to NZ_BOSB01000004.1
aagaatcggtaggagaggtaattgactaccactgtcgtaaatgcggtggcgaattaaacaaaggttaatacgcattcgttgtctaatttggtctcgttttccttatcggctgttatcgaatagtaataaggtagaattcatcctgccggttctct

SEQ ID NO: 15473 - RNA, 168 nt, Bacillus siamensis
  source 1..168: mol_type = other RNA; note = Related to LYUE01000007.1
cagagacggtttggtcatattgatttccactgttgtaattgcggtggtgtattaaaatgtaagggcaaattttcccacgttgtctcttacgctatttactgtactattcgacttttacgattatattatcatgtttttaataaggtagaatacgccaaccgtctctta

SEQ ID NO: 15474 - RNA, 163 nt, Priestia megaterium
  source 1..163: mol_type = other RNA; note = Related to NZ_VDST01000009.1
agagactgatgagaggtaaaattgatttccactgtttgtaattgcggtggtgtataaaaaggtaagagcagatcttatgcgcctttttcgctattatactttttcgactattttgttaacttgtcgctatgtatcataaggtagaatttcctcacagtctctt

SEQ ID NO: 15475 - RNA, 152 nt, Salibacterium aidingense
  source 1..152: mol_type = other RNA; note = Related to NZ_AUCI01000050.1
gaaggaaagtgagcggaagattgatctcgctgttgttactgcagtgttatattaaaatgttagtggatactccgcttatccgctacgttattcacattactttaatcgttaatcgcatcaaataataaggtagaatctctcacttccttcct

SEQ ID NO: 15476 - RNA, 235 nt, Kushneria aurantia
  source 1..235: mol_type = other RNA; note = Related to NZ_KB907919.1
gctgagggttccaacgtgactttctagtgatgctggtgccgcaaggcgccggttcgggtggcggtatcgtcatcatgacggggcgcagactactgctgcttcgcgttggagctgacgcatgaggacaggcgcctcctgcagtgaccctccggggctgctcgaggtctcgccttcactgcaggaggtgactgacccttcgggtctcaaaggtagatggaacgttggaatcctcaca

SEQ ID NO: 15477 - RNA, 235 nt, Pseudomonas aeruginosa
  source 1..235: mol_type = other RNA; note = Related to DAFSJF010000019.1
gctgagggttccagcatgactttctagtgatgccggtgccgaaaggcgtcggttcggatgacgatttcgtcatcatgacggggcgcagactactgccgcttcgcgttggagcttaggcatgagggcaggcgcctcccgcagcgacccttcggggcggttcgaggtctcaccttcgctgcgggaggtgactgacccttcgggtctcaaaggtagatggaacactggaaccctcaac

SEQ ID NO: 15478 - RNA, 237 nt, Citrobacter farmeri
  source 1..237: mol_type = other RNA; note = Related to NZ_RHWV01000005.1
tctgagagtttcagtatgactttctagtgatgctggtactgagaaggtaccagttcggatgactatttagtcatcatgacggggcgcagattactgttgcttcgcgttagagcttacgcatgagggacagacgcctccagcaacgaccctccggggcggctcgaggtctcgccttcgttgccggaggtgactgacccttcgggtctcaaaggtagatggaacgctggaactctcaaa

SEQ ID NO: 15479 - RNA, 237 nt, Burkholderia gladioli
  source 1..237: mol_type = other RNA; note = Related to NZ_CADEYZ010000005.1
attgagggtgccagcgtgaccgtttagtgatgccggcgtcgcaggacgttggtcggatgatgacttaggtcgtcgaagagggggcacagattactgtcgcttcgcgcatgagctcccgctagaggcaaatcgcgctccgccgtgaccctaacggggcggctcggtgcctcgccttctcggcggagcgtgacttacccttcgggtatcaaaggtagatgcaacgctggaaccctcaac

SEQ ID NO: 15480 - RNA, 235 nt, Pseudomonas fragi
  source 1..235: mol_type = other RNA; note = Related to JABEMH010000060.1
gttgagggtcccagcatgactttctagtgatctcagcgtcgaaaggcgctgattcggatgacgacattgtcgtcacgacggggcgcagactactgtggcttcgcgttagagcttccgcatgaggttagccgtctcccgcagtgaccctgcggggcggctcgaggtctcgccttcactgcgggagatgacttacccttcgggtatcaaaggtagatggaacgctggaaccctcaac

SEQ ID NO: 15481 - RNA, 237 nt, Rubrivivax sp.
  source 1..237: mol_type = other RNA; note = Related to SEFB01000022.1
gttgagggcgccagtttgacttctagttgttgtcagggccgaaaggtgctgacgccgatggcgacttttgtcgtctcgtcggggcgcagatttctgttgcttcgcgttgtagctcccgcttgaggtcaagcctcctcccgcagcgaccctgcggggcggatcgaggcctcaccttcgctgcgggaggtgacttacccttcgggtatcaaaggtagatggaacgctggagccctcgcc

SEQ ID NO: 15482 - RNA, 237 nt, Paraburkholderia fungorum
  source 1..237: mol_type = other RNA; note = Related to JAHNIZ010000026.1
gctgagagctccaccgtcttcttctagatgatgctagtgcttgggtgctagcgccgatgacgtccgttgacgtcacaaggggcgcagattactgctgcttcacgttgaagctcctgctcgaaggctaagccgcctcccgcgtcgccccctccggggacggtgcgaggacttaccttcgatgcgggaggtgactcaccctagggtgccaaaagtagatggaacgctggagttctcacc

SEQ ID NO: 15483 - RNA, 198 nt, Xanthomonas campestris
  source 1..198: mol_type = other RNA; note = Related to CP000050.1
gttgagggcgccagtttagatctctagcgttaaggcagttcccgagcgcagcttactgcgtctctctgaaacagctcccgcttgctgctgacgcatcacgcctcctgccgcttcgcgggcgtgtcggggtctcacctcaggatgcgtgatacctcaccaagagcaggtcaaagtagatgtcagactggcgtcctcaac

SEQ ID NO: 15484 - RNA, 202 nt, Stenotrophomonas maltophilia
  source 1..202: mol_type = other RNA; note = Related to JAIOAG010000002.1
gttgagggcgccagtctagacttctagcgttgacggaagtcggagcgcagcttactgcgtctctctggaagagcacccgcttgtcgctgatgcatcgcgcctcctgccgcccaagggcgggcggctcggggtctcacctcaggatgcgcgacacttcacctagaaagcaggtcaaagtagatgtcggactggcgccctcaac

SEQ ID NO: 15485 - RNA, 201 nt, Xanthomonas axonopodis
  source 1..201: mol_type = other RNA; note = Related to NZ_RWJW01000004.1
gttgagggtgccagtctaagcatctagcgttgacagatcgtcggagcgcagattactgcgtctctttggaagtgcacccgcttgccgatgacgcgtcacgcctcccgccgcgcaagcgcggccgtgtcggggtctcccctcgggatgcgtgacacctcaccaaaagcaggtcaaagtagatgtcggactggcactctcaac

SEQ ID NO: 15486 - RNA, 237 nt, Haliangium sp.
  source 1..237: mol_type = other RNA; note = Related to MTCS02000083.1
gttgagggcgccagaggagacttctagttgatgccggcaaatgccggcgccgacatgtggccgtgcgctgcatgtaatcgggacgcagagtctgcgatccttcggcatagctcgcgcttgatgctaaggcgtgtcgcgcactgccgcctgcggcggatcgcggcgaggtcttgcttcagcgcgcgacacgtctcacccatggggtgtcaaagtagatgactcgctggcgccctcaac

SEQ ID NO: 15487 - RNA, 236 nt, Rhizobium laguerreae
  source 1..236: mol_type = other RNA; note = Related to JAAXRA010000003.1
gttgagggcgccagtgagtctttctagatgacgccggttcgccggcggcgacatctggctaatggccaggtgtctcggggcgcagattctgcagctcttaggctaagcgtccgctcgaagctaaggcacatcacgcaacgccgccttgcggcggatcgcgtcgaggtcttgctacgtcgcgtgatgtgtctcacccccagggtgtcaaagtagaatgacaacctggcgccctcaac

SEQ ID NO: 15488 - RNA, 239 nt, Rhizobium anhuiense
  source 1..239: mol_type = other RNA; note = Related to NZ_NWSJ01000022.1
gttgagggcgccagtgagtctttctagatgacgccggtgtaccggcggcggcatctggtcactggccaggtgtctcggggcgcagattctgcagctctcaggctaagcgtccgctcgaagctaaggcacatcgcgcaacgccgccgcgtggcggcggtcagtgtcgaggtctcgcttcgtcgcgcgatgtgtctcacccccagggtgtcaaagtagaatgaccagttggcgccctcaac

SEQ ID NO: 15489 - RNA, 252 nt, Sphingomonas pruni
  source 1..252: mol_type = other RNA; note = Related to NZ_BCYZ01000072.1
gttgagggctcctgtgggatcgcatagttgacgtcgccgcatcagctttgctgttgtttcgacggcagcatatggtcttcgggccatgtgcttcggggcgcagaatctgctgctctcaggacaagccttcgctcgatgctaaggcacatcgcgcaacgccgcctgcggcggatcgcgtcggtgtctagctacgtcgcgcgatgtgtctcacccccagggtgtcaaagtacgtgacctcctggagccctcaac

SEQ ID NO: 15490 - RNA, 241 nt, Komagataeibacter europaeus
  source 1..241: mol_type = other RNA; note = Related to NZ_CP021467.1
gttgagggcgccgcagggactttctagttgatgccggtcgagaggccggcgccgggccgaaagccttcgggcttgacgtccatgggccgcagactctgcgtgtctacggaaaagcgggcgcttgaagctaaggcagatcgcgaagtgccgccttcggcggttcgcggtgatgtcttgctccactccgcgatctgtctcaccccttgggtgtcaaagtagatggtcgggtggcgccctcaac

SEQ ID NO: 15491 - RNA, 238 nt, Mesorhizobium sp.
  source 1..238: mol_type = other RNA; note = Related to SADI02000018.1
gttgagggctccctcgaaggtgtctagttgatgccggttaccccggcaccgatgggtggtcttcgggccgctcattcacggagcgcagattctgcgtctctttggccaagcgtccgctcgatgctaaggcatgtcccacagcgcccgctcaagggcgggccggggcgatgtcttgctcgctgcgggacatgtctcacccccagggtgtcgaagtagatgtcccggtggagccctcaac

SEQ ID NO: 15492 - RNA, 238 nt, Mesorhizobium sp.
  source 1..238: mol_type = other RNA; note = Related to RZQP01000036.1
gttgagggctccatcgaaggtgtctagttgatgccggtcattccggcaccgatgggcaatcttcggattgttcattcacggactgcagattctgcagctctttggccaagcgtccgcttgatgctaaggcatgtcccacagcgcccgcccaagggcggttcggggcgatgtcttgctcactgcgggacatgtctcaccccttgggtgtcgaagtagatgtcccggtggagccctcagc

SEQ ID NO: 15493 - RNA, 238 nt, Devosia sp.
  source 1..238: mol_type = other RNA; note = Related to LMHK01000002.1
gttgagggttccattcggacgttctagttgatgccggccccccgccggcacctgcatccagccgccgtgctgtttgctcggggcgcagattctgcagctctttggtctagctcgcgcttgaggccaaggcatctcccacatcgtccgcctgacggcggcgcagggcgtagccttcctcgatgcgggagatgtctcaccttttcggtgtctaagtagatgactcggtggaaccctcagc

SEQ ID NO: 15494 - RNA, 227 nt, Dyella sp.
  source 1..227: mol_type = other RNA; note = Related to JAAOYS010000006.1
gctgagggggccagttccttctgtttagttcagccacttcggtggcgccagcgcatgtcttccatgctggtggggcgcagactctgttgcctcctgtaatagctctcgcatgatgctcaggcaggtcacgcaatggtcgcgagcgaccggagcgaaagccttcctccatcgcgtgacctgtctcaccctacgggtgtcaaagtagatggaagactggctccctcagc

SEQ ID NO: 15495 - RNA, 231 nt, Bacillus sp.
  source 1..231: mol_type = other RNA; note = Related to NADW01000002.1
gttgagggagccagtcccttccgtttagttcacgtcgcctcgggcggcgccattgcatgggattccatgttttgggggcgcagattctgctgccttctgtaatagctgtcgcatgatgctcaggcaggtcacgcaatgcccgcgtagcggacagagcgaaagcctcccttcatcgcgcgacctgtctcaccctacgggtgtcaaagtaaatggaaaactggctctctcagc

SEQ ID NO: 15496 - RNA, 232 nt, Dyella solisilvae
  source 1..232: mol_type = other RNA; note = Related to QQSY01000005.1
gctgagggcgccagtggggaattctagttagccgggcctagcccggtgccggcttacagttaaccgtaagtaagcggggtgcagagtctgcttcccttcgtattagctctcgcttgatgctaaggcaggtcacacgattgccgctgcgcggcacgtgcggatgtcttactgcatcgtgcgacctgtctcaccctacgggtgtcaaagtagatgacccactggagccctcagc

SEQ ID NO: 15497 - RNA, 225 nt, unidentified
  source 1..225: mol_type = other RNA; note = Related to JACRPC010000021.1; note = Rhodospirillales bacterium
gctgagggcgccacgccgtgtgtctagttgacgctggcactggccagcggcgacaggcggttttcagacccctgtccacggggagcagattctgcgtcctttcggaaaagcgtcggcttgcggctaaggccggtcacgccttatctcgcggcgaagtctggcggcaaggcgcgaccggtctcacccttcgggtgtcgaagtagatgacgatgtggcgtcctcagt

SEQ ID NO: 15498 - RNA, 230 nt, Pseudomonas savastanoi
  source 1..230: mol_type = other RNA; note = Related to CP032456.1
gttgagacatccaatctagattctagcttcggcgtacattcctagaatgttgctgccatgatgagttggatactcagctcgtcactgggcgcagactactgctgccctatgtcatagctcctgcttgcggttaagcgctcacgccacagtttggtggtgtggccttccaactgcggcgcgagcactcaccctccgggtgtcaaagtagatgaaggattggacgcctcaac

SEQ ID NO: 15499 - RNA, 230 nt, Pseudomonas veronii
  source 1..230: mol_type = other RNA; note = Related to NZ_CP018420.1
gttgaggcatccaatctagattctagctccggcgcacgttcctagaatgttgctgccatgatgggttggattctcaactcatcaccgggcgcagaatactgctgccctatgtcttagctcctgcttacggttaagcgctcacgccacagcctagtggcgtagccttctgcccgcggcgcgagcactcaccctgcgggtgtcaaagtagatgaaggattggacgcctcaac

SEQ ID NO: 15500 - RNA, 230 nt, Pseudomonas protegens
  source 1..230: mol_type = other RNA; note = Related to PPEF01000002.1
gttgaggcatccaatctagattctagcttcggcgtacgttcctggaatgttgctgccatgatgggttggattctcagctcatcaccgggcgcagattactgctgccctatgtcttagctcctgcttgcggttaagcgctcacgccacagcctagtggcgtagccttctgcctgcggcgcgagcactcaccctgcgggtgtcaaagtagatgaaggattggacgcctcaac

SEQ ID NO: 15501 - RNA, 232 nt, Pseudomonas aeruginosa
  source 1..232: mol_type = other RNA; note = Related to CP077977.1
gttgaggcaaccaatctagattctagcttcggcgtacgttcttcgggacgttgctgccagatgggtcaagcttcacggctcatcaccgggcgcagactactgcagccctatgtattagctcctgcttacggctaagcgctcacgccacagcctagtggcgtaagccttctgcctgcggcgcgagcactcaccctgcgggtgtcaaagtagatgaaggattggaagcctcagc

SEQ ID NO: 15502 - RNA, 233 nt, Pseudomonas sp.
  source 1..233: mol_type = other RNA; note = Related to NZ_LT629756.1
gttgaggcgaccagtctagattctagcatcggcgtgcattcctggaatgttgccgccaagacgagtcaggctttaagactcatctaccgggcgcagactactgctgctctatgtcctagcccccgcttacggttaagcgctctcgccacagttcacgtggcgtggccttcggcctgcggcgggagcactcaccctgcgggtgtcaaagtagatgaaggattggaagcctcaac

SEQ ID NO: 15503 - RNA, 232 nt, Pseudomonas fluorescens
  source 1..232: mol_type = other RNA; note = Related to NZ_CABVIT010000001.1
gctgaggcaaccaatctagattctagctccggcgtgcgttcttagaatgttgccgccaagatgagtaggcttcacaactcatctaccgggcgcagattactgttgccctatgtcctagcccttgcttacggctaagcgctcacgccacagcctagtggtgtatgccttctgcctgcggcgcgagcactcaccctgcgggtgtcaaagtagatgaaggattggaagcctcagc

SEQ ID NO: 15504 - RNA, 232 nt, Pseudomonas guguanensis
  source 1..232: mol_type = other RNA; note = Related to FNJJ01000006.1
gctgaggcaaccaatctagattctagcttcggcgtacatccttgagatgttgccgccaagatgagtcacgcttcacgattcatctaccgggcgcagattactgctgctctatgtactagcccctgcttacggctaagcgctcacgccacagcctagtggcgtggccttctgcctgcggcgtgagcactcaccctgcgggtgtcaaagtagatgaaggattggaagcctcagc

SEQ ID NO: 15505 - RNA, 231 nt, Jeongeupia naejangsanensis
  source 1..231: mol_type = other RNA; note = Related to JAESND010000005.1
gttgaggcatccggtctaagcaatctagattcggtgcgcgtcgaagaggacgtaaccaccatcgatgcgcctcggcgtatcgaccgggcacagactactgtcgctctatgtaacagcccccgcttacggctaagtacgcccgccacaaggctacgtggcgaggtcttcggcttgcggcgggcgtactcaccctgcgggtgtcaaagtagatgacagactggaagcctcaac

SEQ ID NO: 15506 - RNA, 229 nt, Chromobacterium phragmitis
  source 1..229: mol_type = other RNA; note = Related to CP029554.1
gttgaggtctcctgtcaaagaaatctagatccggtgcgcgtcggtatgacgcagccaccattggtgtactttggtacatcaaccgggcgcagactactgccgccctatgtattagctcctgcttacggctaattatgcccgccacagccaacgtagcgaggtcttctgcctgcggcgggcatcatcaccctacgggtgtcaaagtagatgacagactggaaacctcaac

SEQ ID NO: 15507 - RNA, 229 nt, Mitsuaria sp.
  source 1..229: mol_type = other RNA; note = Related to FOZE01000001.1
gttgaggcatccagtctgaaagtctagattcggtgcgcgtcgagaggacgcagccaccattgatgagcatcggctcatcaaccgggcgcagactactgccgctctatgaaccagctcctgcttacggctaagccctcccgccacaaggttacgtggcgtagccttctacttgcggcgggagacctcacccagagggtgtcaaagtagatggatgattggaagcctcaac

SEQ ID NO: 15508 - RNA, 224 nt, Alcaligenes faecalis
  source 1..224: mol_type = other RNA; note = Related to NZ_CP013119.1
gttgaggcatccagtctaactttctagattcggtgagcgttgagagaacgcagccaccagcgcacttcggtgtgttaaccgggcacagactactgatgctctatgatttagctcccgctcacggtcgagggctccctccacgcacacgtggcgagggcttcggtgcgtggagggagacctcaccctacgggtgtcaaagtagatgaatgattggaagcctcaac

SEQ ID NO: 15509 - RNA, 234 nt, Pseudomonas sp.
  source 1..234: mol_type = other RNA; note = Related to AKJM01000112.1
gttgaggcaaccaatctcagaagtctagattcggtgcgcgttgttgttaaggacgcaaccaccattgatgcgtttcgacgcatcaaccgggcgcagactactgctgctctatgttttagcccccgcttacggctaagcgctcccgccacaaggctacgtggcgagggcttcggcttgcggcgggagccctcaccctgcgggtgtcaaagtagatgacagattggaagcctcaac

SEQ ID NO: 15510 - RNA, 228 nt, Pseudomonas thivervalensis
  source 1..228: mol_type = other RNA; note = Related to NZ_LT629691.1
gttgagacgaccagtctgaaatctagattcggtgcgcgttgaacagaacgcaaccaccattgatgcgcttcggctcatcaaccgggcgcagactactgccgctctatgatatagcccttgcttacggccaagcgctcccgccacacgcgacgtggcgaggtcttctgcctgcggcgggagccctcaccctacgggtgtcaaagtagatgaaggactggaagcctcaac

SEQ ID NO: 15511 - RNA, 216 nt, Bordetella sp.
  source 1..216: mol_type = other RNA; note = Related to NZ_VEHL01000001.1
gttgagagcaccggtttttccatctagttgaagaagtggcttcgcgctactgaaccatacttttggtaccggactcagactactgtagatcctctggaatagcatccgcttgcggctaaggttacccgtcactctaccgtggcgaggacttcggatcgtgacgggtaatctcacccccgcgggggtcaaagtagatggaaaactggcgttctcaac

SEQ ID NO: 15512 - RNA, 217 nt, Orrella marina
  source 1..217: mol_type = other RNA; note = Related to NZ_CP028901.1
gttgagagcgccggttcttttgtctagttgaagaagtggcttcggccatggaaccataccttttggtaccggactcagactactgcagctcctatggaatagcgtctgcttgcggccaaggtcgcccgtcactcttaccgtggcggtgacttcggtgagcgacgggcgatctcacccccttgggggtcaaagtagatggaaaactggcaccctcaac

SEQ ID NO: 15513 - RNA, 214 nt, unidentified
  source 1..214: mol_type = other RNA; note = Related to JACRAR010000013.1; note = Betaproteobacteria bacterium
gttgagggcgccaattattccatctagttgacgccgtggtttcgtgccacggagccatacttcggtaccggactcagactactgcagttctatggaatagcatccgcttgcggctaaggtcacccgtcactagtccgtggcgtggccttcggctagcgacgggtgatctcaccccctcgggggtcaaagtagatggaaaattggcgttctcaac

SEQ ID NO: 15514 - RNA, 214 nt, Paraburkholderia sp.
  source 1..214: mol_type = other RNA; note = Related to QUNA01000002.1
gttgagggcgccggtttagctatctagttgacgccgcggcttcgtgccacgggaccatacttcggtaccggactcagactactgcagttctatggaatagcatccgcttgcggctaaggtcacccgtcactagctcgtggcgagggcttcggccagcgacgggcgatctcaccccctcaggggtcaaagtagatgggaaattggcgtcctcaac

SEQ ID NO: 15515 - RNA, 233 nt, Methylobacter luteus
  source 1..233: mol_type = other RNA; note = Related to NZ_KE386569.1
gttgaggtctccttattccaaagtctagatgaagcccactttcttcggagatgtcgggaaccacatggcgctaacgcgccatgaccgggcgcagattgctgtaagccctatgattaagctcacgcttgcggctaaggcctctcgccacaaagctcgtggcggagtcttcggctttgcggcgagaggtctcacccttcgggtgtcaaagtagatggcagattggaaacctcaac

SEQ ID NO: 15516 - RNA, 226 nt, Methylobacterium sp.
  source 1..226: mol_type = other RNA; note = Related to JAIETD010000002.1
gctgagggagcctcgtgaaatctagtgatcgtcggtggtaactcgccgacggcggtcggttcggtgacgagccgatcggggacggggactaccccgccccttcgagtgagcgtccgcatgctgccaaggctgggcccaccccgaattgcgtcgggtgtctcctgccggggcgggcctagcctcgccagaggcgagtcagagtagatgctcacgaagcgccctcagc

SEQ ID NO: 15517 - RNA, 245 nt, Burkholderia lata
  source 1..245: mol_type = other RNA; note = Related to CABVPY010000024.1
gctgagacctccggtcaaacgctagcttgtgtcatggcttcggccatgaacctttgtcgagagacgtggcggccgagtaggcctgccttagattgagctcgcgcatagcctgagatcggcgacacgccgcggacgctggcggaaaagtctggctgcgacgtgtcgccgaccacagggcttgcgggctaccgataccgtgacaacacacaaaacagccaaagtagctccagccggatggtttcagc

SEQ ID NO: 15518 - RNA, 229 nt, unidentified
  source 1..229: mol_type = other RNA; note = Related to JAFCZG010000487.1; note = Deltaproteobacteria bacterium
gctgagggcaccacaaattgcatctagttaatgttggactaacaatccagctacagcgtacttggttcatctgggtacgattgtggggagcagattactgctacttcttgtttgagcgggcgcttgcgctaaggtctgtcacgctttgctcttggcgagggtcttgcggcaaaccgcgacagatctcacctaaaggtgtcaaagtagatgtgtagttggtgtcctcagc

SEQ ID NO: 15519 - RNA, 228 nt, Aliikangiella marina
  source 1..228: mol_type = other RNA; note = Related to NZ_VIKR01000006.1
gctgagggcaccgcaaattgcttctagttaatgttggcctaactagtcaactacaacgtgcttttatctttattgcacgattgaggggtgcagaatactgctactctttgtttgagcgagcgcttgcgctaaggtctatcgcgctttgcgcgtggcgaagacttgcggcaaaccgcgatagaactcacctgacggtgtcaaagtagatgcatatttggtgccctcagc

SEQ ID NO: 15520 - RNA, 228 nt, unidentified
  source 1..228: mol_type = other RNA; note = Related to JAESRL010000013.1; note = Porticoccaceae bacterium
gctgagggcaccaacaattgcttctagttaatgctggctttaaaaaccagttacatcacgcttggttatatccggcgtggttatggggtgcagaatactgctacttcttgtttgagcgtgcgcttgcgctaaggtctgtcgtgctttacgcgtggcggagtcttgcggcaaaccacgacagatctcacctaaaggtgtcaaagtagatgcatagttggtgtcctcagc

SEQ ID NO: 15521 - RNA, 234 nt, Marinobacter sp.
  source 1..234: mol_type = other RNA; note = Related to NZ_CP034142.1
gttgagggttccagttgatgtatctagttcacgctgaaccggttcttccgggttggcaacagtgtgacacactagatttgtcacacttacggagagcagattactgcgactctatggatgagcttgcgcttgcgctaaggtttgtcgcgctatccacgcggcggggactggcgggcaagcgcgacaaatctcacctaaaggtgtcaaagtagatgcatcgctggaatcctcaac

SEQ ID NO: 15522 - RNA, 215 nt, Methylophaga sp.
  source 1..215: mol_type = other RNA; note = Related to VENF01000020.1
actgggagtgccggatgactcatctagtgcacgttagattgctaacgacgcttttttcaactgaaaaaagtgggagcggagactactccagcttctcggccaagcccttgctcgtaattaagcgtgtcgcgtctgcgcctgcggcgttaccttcttggcttgccacgacaccatcccctatgggtcagagtagatgagtcgaaagcactctcagt

SEQ ID NO: 15523 - RNA, 216 nt, Methylophaga sp.
  source 1..216: mol_type = other RNA; note = Related to NZSL01000007.1
actgggagtgccggatgacttatctagtgcatgttagtttactaactacgcttttttctgttgaaaaaagtgggggcggagattacttcagcttctcgggcaagcctttgcttgtggctaagcgtgtcgcgcctgcacctgcggcgttacctccttggcttgtcacgacacctacccctttcgggtctgagtagatgggtcgaaagcactctcagt

SEQ ID NO: 15524 - RNA, 219 nt, Burkholderia cepacia
  source 1..219: mol_type = other RNA; note = Related to NZ_CP013376.1
tctgaggcggccacgtcaggtctagtgaaaccccatctagcgatagatgggtgggcccctagcaataggagagagccgaagtcggtctctcgcggtggcagcaggcgcattaggcaaaatcagccgaaactgtgccttaacgctcgcggtctcgctgttcagtttcggctgattctgcgaaaaacaattcaaagtagatgaaaacctggtcgcctcaga

SEQ ID NO: 15525 - RNA, 231 nt, unidentified
  source 1..231: mol_type = other RNA; note = Related to QBMO01000003.1; note = Alphaproteobacteria bacterium
tctgagagcgccaaagtgaggtgtttagctcatgccgcacctaacgcgtgcggagcggtgctcgcctgcgagggcgagtggcctcgggcagcagcttctgcttgcctgcgaactagccaacttaagtggcaattcctcagcaaggcactttccggtgcgaagtcttccgccgcgccttgctggggagccgccttcggcggtcaaagtaaatgactccttggcgctctcagg

SEQ ID NO: 15526 - RNA, 231 nt, Nitrospina sp.
  source 1..231: mol_type = other RNA; note = Related to JABJCF010000323.1
tttgagagcgccaatggagaaatttagctaatgctgtattacataatacagtacggctttctcccgcgagggggaaaagcttcgggcggtggattccacctgcctacgtttaagcagtcttctgttgcaaaatatagccaagccactagttggtgcgaagtcttccctagtgccttgcctattttccgcataaaccgcggtcaaagtaaatgactccttggcgctctcgat

SEQ ID NO: 15527 - RNA, 235 nt, Poseidonocella sedimentorum
  source 1..235: mol_type = other RNA; note = Related to NZ_FOYI01000015.1
gttgagagcgccaaagtgaaccatttagcaaacgcggccagtgtagactggcagcggataggcgaatgcttgaaagagcacacggcctcgggtgaaggattccgcaagcccgcgatgaagctcactacagcgtcaaactacaaggaaagacacgctgacgtcgaagtctcctacgtgtcttcccttgtcgtcgccccaaggggctcgaagtaaatggaaccgtggcgctctcagc

SEQ ID NO: 15528 - RNA, 233 nt, unidentified
  source 1..233: mol_type = other RNA; note = Related to JAHLLJ010000012.1; note = Deltaproteobacteria bacterium
tttgaggatgccacatggataatctagttttcgctggttcgctaaccagtggcgatggacctgtaagagggttcattttggagcgcagattgctgcgtctctacgaaatagcctttgcttctgaacaaggctaggaacgtcgtgcgacgctacgtcctgcggagccttgctgcacgacgttcctaccctcgcccttcgggcgtcaaagtagattaacatgtggcatcctcatt

SEQ ID NO: 15529 - RNA, 225 nt, Rhizobium lentis
  source 1..225: mol_type = other RNA; note = Related to JACHBD010000013.1
gttgagggttccccgcgatgtctagtggatgtcgattcgaaaggattggcaccgatgggccttcgggccctgggccgtcgattacgacgtgttcgcgatcaagcgtccgcttgatgatatccttgatcgaaacgtacggccatggccgccgcagcgcacgtctcgcttacgtctcgatcaacgaaaccctatgggggtcaaagtagatggcgtggaactctcaac

SEQ ID NO: 15530 - RNA, 225 nt, Rhizobium laguerreae
  source 1..225: mol_type = other RNA; note = Related to JAAXSV010000011.1
gttgagggttcctcgcgatgtctagtggctgtcgattcgtgaggatcggcaccgacgggccttacagccctgggccgtcgattacgacgtgttcgcgatcaagctcccgcttgatgatatccttgatcgaaacgtacgtccaaggccggcgcagcgcaagtctcgcttacgtctcgatcaaagacaccctaaaggggtcaaagtagatggcgtggaactctcaac

SEQ ID NO: 15531 - RNA, 225 nt, Rhizobium leguminosarum
  source 1..225: mol_type = other RNA; note = Related to WUFA01000001.1
gttgagggttcctcgcgatgtctagtggctgtcagttcgagaggattggcaccgacgggccttcgggccctgggccgtcgattacgacgtgttcgcgatcaagcgtccgcttgatgatatccttgatcgaaacgtacgaccgaggtcgccgcagcgcatgcctcgcttacgtctcgatcaaagacaccctatgggggtcaaagtagatggtgtggaactctcaac

SEQ ID NO: 15532 - RNA, 246 nt, Maritimibacter alkaliphilus
  source 1..246: mol_type = other RNA; note = Related to NZ_VNHV01000015.1
gttgagagcgccacgcgatgtctagtggttgccggggtaacgaccggcaccgttggtgtcacgtcctgcccgcaggaggtgatgcctgggccgtcgattgcgatgggctcacggtcaagctttcgcttgatgctcaacttgatcgaaccgcacgaccttgcggtcgccgcagcggtaggctgacttgcgatccgatcaagctcaccctgaagggtggatagtagatgcgaacgtggaactctcaac

SEQ ID NO: 15533 - RNA, 238 nt, Pseudorhodobacter sp.
  source 1..238: mol_type = other RNA; note = Related to NZ_PGOI01000009.1
gctgagaatgccgcgcgatgtctagtggttgccggttgcggcaccgttggggccatcgttcagcgatggacgaggtctctgggccgtcgattgcgacgtgctcacggtcaagctggtgcttgatgctaacctcgatcgaagcacacgacctgcggtcggcgctgcgcgtgcctcgcttgtgctccgatcgaggtcaccctgtcgggtgaatagtagatgaacgattggcattctcagc

SEQ ID NO: 15534 - RNA, 228 nt, Phaeobacter gallaeciensis
  source 1..228: mol_type = other RNA; note = Related to QOCE01000045.1
gttgagaccgccacgaagggcttttggatgacgccggttgcaagagccggcgccgatgttcggttgagaaatcggatattgtgggcagcagattctgcgcgccttcggactagctttcttgtagcgctgacgtggatcgcgccgtgccacgatgcgcggcctttctacacggcgcgatccgcaccacccttgcggagtcgaagcaaatgactctctggcggtctcaac

SEQ ID NO: 15535 - RNA, 228 nt, Ruegeria sp.
  source 1..228: mol_type = other RNA; note = Related to JAGHRB010000006.1
gttgaggccaccaagaaggaaatttggatgatgtcggctgcaagagccgacgccgaaatccggtcgaaagaacgggttttatgggcagcagaatctgcgtgcctgcggaatagcttccttgccgcgctgacgtggatagcgccgtgcgacgatgcgcggcctttctgcacggcgctatcctccccatccttgcggagtcaaagcaaatgactgcttggcggcctcaac

SEQ ID NO: 15536 - RNA, 227 nt, Cereibacter sphaeroides
  source 1..227: mol_type = other RNA; note = Related to CP036420.1
gttgaggccgccatgttgagggtatctggatgacgccggtcgcaagggccggtgccgatgttggacgaaagtcgagcatactgggcagcagaatctgcgcgccttcggaaaagcttccttgcagcgctgacgtggatcacgccgcatcacggtgcggggtcttcctatgcggcgcgatcctccccaccagaggtggtcaaagcagatgacctcttggcggcctcagc

SEQ ID NO: 15537 - RNA, 223 nt, Hyphomicrobium sp.
  source 1..223: mol_type = other RNA; note = Related to LR743509.1
gctgagaccgccgaagagtctatttagatgatgctggggcgagagccctggcaccgccggccgcaaggccggaggcggggcgcagattctgcgaccctacggaaaagctcgcttcggcagctgatcatcgtcgagctcgctctcggatcggtgtcttcccgcgcgaactcgacgatcctcaccctacgggtgtcaaagtaaatgaccatttggcggcctcagc

SEQ ID NO: 15538 - RNA, 226 nt, Rhodanobacter sp.
  source 1..226: mol_type = other RNA; note = Related to NZ_JACHCP010000006.1
tctgagggcgccacgtgtctgagtttaggtatgccccatggaatacttaggtattcttagacgaagcgatttttcgtcaggatctggctacttgccgggtctttggaaaagcaggtgcttgcgtgcaagacacctagcgacgggacggctggcggagtcttgcctagcgtcgctaggcggctcgcccgttgggcgtcaaagtagatgaggtcgtggcgtcctcaga

SEQ ID NO: 15539 - RNA, 206 nt, Vitiosangium sp.
  source 1..206: mol_type = other RNA; note = Related to PZOX01000020.1
tttgagggccgccaagaggacatcttagcgttccccaccggattccggtgggcccatacggaaactcggatactgagtttcttggaagtagcccccgcaatggcgcaaggtgcggtgaagcccgcctggtccgacgtgcgcctgggtcggtcttcaccgtacctcgctccgcagtcaaagtaagatgtcctcttggcgccctcatc

SEQ ID NO: 15540 - RNA, 204 nt, Pseudomonas mangiferae
  source 1..204: mol_type = other RNA; note = Related to NZ_VJOY01000004.1
gctgagggctccgctgtagcggaatctagtatcccgcacattgtgcggggcgtttttgggagcaaactatgcttaccgttgaacgatctcacgcctactggagggcggcaggctccatggtgttcgctatcgaagtctggcgccagaagcctgccatccgccagggcggaatttaaaggtagatgagtcgctggagctctcagc

SEQ ID NO: 15541 - RNA, 204 nt, Pseudomonas sp.
  source 1..204: mol_type = other RNA; note = Related to NZ_JH635998.1
gctgagggctccgcagtagcggaatctagtatcccgcgcgttgcgcggggcgtttttgggagcaaactatgcttaccgtcggacgatctcacgcctactggagggcggcagccttcatggtgttcgctatcgaagtctggcgccagaaggctgccatccgccagagcggaatctaaaggtagatgaatcgctggagctctcagc

SEQ ID NO: 15542 - RNA, 204 nt, Pseudomonas simiae
  source 1..204: mol_type = other RNA; note = Related to NZ_CP007637.1
gctgagggctccgcagtagcggaatctagtattcccgcgcgttgcgcggggcgttttgggagcaaactatgcttaccgtcgaacgatctcacgcctgctggaggttggcagccttcatggtgttcgctatcgaagtctggcgccagaaggcttccatccgccagggcggaatctaaaggtagatgagtcgctggagctctcagc

SEQ ID NO: 15543 - RNA, 201 nt, Pseudomonas plecoglossicida
  source 1..201: mol_type = other RNA; note = Related to CP031146.1
gctgagggctccgcagtagcggaatctagtatcccgcacgatgtgcgggcgttaagggagcaaattatgcttgccgtcgaacgatctcacgcttccaggaggtataagccttctacggctcgctatcgaagtcttgcggcaagaaggcttatatccgccagggcggagcttgaaggtagatgactcgctggagctctcagc

SEQ ID NO: 15544 - RNA, 204 nt, Pseudomonas farris
  source 1..204: mol_type = other RNA; note = Related to NZ_JAHSTV010000019.1
gctgagggctccgcagtagcggaatctagtatcccgcgcgttgcgcggggcgttattgggagcaaactatgcttaccgtcgaacgatctcacgcctactggagggcggcagccttcatggtgttcgctatcgaagtctggcgccagaaggcttccatccgccagggcggaatctaaaggtagatgaatcgctggagctctcagc

SEQ ID NO: 15545 - RNA, 202 nt, Pseudomonas sp.
  source 1..202: mol_type = other RNA; note = Related to NZ_CP085704.1
gctgagggctccgcagtagcggaatctagtatcccgtgcgttgtgcgggacgataagggagcaaattatgcttgccgttggaacgatctcacgcctaccggaggtgggaaccttcctttactcgctggcgatgtctggcgatcagaaggctccctccgccagggcggaatctaaaggtagatgaatcgctggagccctcagc

SEQ ID NO: 15546 - RNA, 201 nt, Pseudomonas sp.
  source 1..201: mol_type = other RNA; note = Related to NZ_CP061943.1
gctgagggctccgcattagcggaatctagtatcccgcacgttgtgcgggcggcttgggagcaaattatgcttaccgtcgaacgatctcacgcgtactggaggttggcagccttcgtggtgttcgctatcgaagtctggcgccagaaggcttccatccgcagggcggaattcaaaggtagatgacccgctggagctctcagc

SEQ ID NO: 15547 - RNA, 202 nt, Pseudomonas viridiflava
  source 1..202: mol_type = other RNA; note = Related to NZ_UVZC01000005.1
actgagggctccgcagtagcggaatctagcatcccgcacgttgtgcgggcgttaagggagcaaactatgcttgccgtcgaacgatctcacgcttccaggaggtataagccttctcaggctcgctatcgaagtcttgcggcaaagaaggctcatatccgccagggcggaatctaaaggtagatgactcgctggagccctcagt

SEQ ID NO: 15548 - RNA, 202 nt, Pseudomonas aeruginosa
  source 1..202: mol_type = other RNA; note = Related to CP024630.1
actgagggctccgaagtagcgaaatctagcaccctgcactctgtgcaggacgtttagggagcagactctgcttacccatggaacgatctcacgctgacaggaggttggggaccataaaattacgctacgatgtcttgcgattttacggtccccatccgccagggcggaatctaaaggtagatgaaacgctggagccctcagg

SEQ ID NO: 15549 - RNA, 203 nt, Pseudomonas avellanae
  source 1..203: mol_type = other RNA; note = Related to NZ_AVEP02000116.1
actgagggcttcgcaatagcggaatctagtatcccgcactctgtgcgggacgtttagggagcaaactctgctttccgttggaacgatctcacgctgacaggaggttaagagcctgaaaattacgctatcgatgtctggctattttaaggctctcatccgccagagcggaatctaaaggtagatgaaacgctggagccctcagt

SEQ ID NO: 15550 - RNA, 204 nt, Pseudomonas sp.
  source 1..204: mol_type = other RNA; note = Related to MKGS01000151.1
gctgagggccccgcagtagcggaatctagtaccctgcacgctgtgcaggacgttaaagggagcatattttgctttccgtaggaacgagctcacgctttccgttggttaagagcctcaaaatcacgcaaacgaggtcttgctatttcgaggctctcatccgccagagcggaatctaaaggtagatgaatcgctggagccctcagc

SEQ ID NO: 15551 - RNA, 200 nt, Pseudomonas sp.
  source 1..200: mol_type = other RNA; note = Related to NZ_FYDX01000020.1
gctgagggctcccacttagcgaaatctagaatcctctagactctagaggctgtaggaagcaggttatgctgtccataggaagaacccccgcaaaacaggaggttgagcacctcgttcctacgctggcgttgtcttgcgatctcgaggcgctcatccgcctgggcggaatctaaggtagatgaatcgctggagccctcagc

SEQ ID NO: 15552 - RNA, 201 nt, Pseudomonas putida
  source 1..201: mol_type = other RNA; note = Related to NZ_CP061723.1
gctgagggctccaacttagcgaaatctagaatcctctagactctagaggctgtaggaagcaggttatgctatccataggaagaacccccgctgaacaggaggttgagcgcctcgctcttacgctggtgtatgtcttgcggtctcgaggcgctcatccgcctgggcggaatctaaggtagatgaatcgctggagccctcagc

SEQ ID NO: 15553 - RNA, 203 nt, Pseudomonas sp.
  source 1..203: mol_type = other RNA; note = Related to NZ_LHVL01000030.1
gctgagagctccgatttagcggaatctagaatcctctgcaattggtagaggctgtaggaagcaggctatgctgtccgatggaagaacattcgcattacaggaggttgggtacctcgcatcttcgccggcggagtcttgcgggcttcgaggcacccatccgccagagcggaatctaaggtagatgaatcgctggagctctcagc

SEQ ID NO: 15554 - RNA, 201 nt, Pseudomonas sp.
  source 1..201: mol_type = other RNA; note = Related to JACVBX010000001.1
gctgagagctccgttttagcggaatctagaatcctctagtaaatagaggctgtaggaggcaggatatgctgtccgaaggaagaactgacgcttcatgggaggatgtgtgcctcgagcctacgcaggcgatgtctggcggtcgcgaggcgcacttccgcccttggcggaacctaaggtagatgactcgctggagctctcagc

SEQ ID NO: 15555 - RNA, 206 nt, Pectobacterium versatile
  source 1..206: mol_type = other RNA; note = Related to NZ_CAKLIV010000056.1
tctgagagctccgagagcttgaatctaggctcctccaatacttttggaggctgatagggcagctaattgctaaccctcaggttgaactggcgcttacagggaattcacaactcattctactcgtttacgtaagccttacgatcacgagttgtgcattcgctgccgcgaatggaatctaaagtagatgaactcttggaactctcaac

SEQ ID NO: 15556 - RNA, 202 nt, Pantoea sp.
  source 1..202: mol_type = other RNA; note = Related to JACVUO010000002.1
attgagagctccgtatccttgagtctagtatcctccttaatttggagggctgaggggcaaccaatggtttcccatagtttgaactgacgcatactgggaatacacaactcacacctgtcgccgacgtatgccttgcggctgtgagctgtgcattcgctgcgcgaatggagtctaaggtagatgaagatatggagccctcact

SEQ ID NO: 15557 - RNA, 200 nt, Pseudomonas sp.
  source 1..200: mol_type = other RNA; note = Related to NZ_LPNO01000008.1
gctgcgggctccagtttaaaggaatctagcaatctccccctgctgggagctattagggcacatgttttgtgtaccgaaggacgatccaacgcttacaggaggatccacgactcttcacttggcgctacggagccttgctgcttgagtcgcgcttccgcctgagaggaatcaaaggtagatgaccaactggagcccgcagc

SEQ ID NO: 15558 - RNA, 200 nt, Pseudomonas corrugata
  source 1..200: mol_type = other RNA; note = Related to NZ_LIGO01000012.1
gctgcgggctccaacttagtggaatctagcaatctccccctagttgggagctactaggacacatactttgtgctccgaaggacgatctaacgcttacaggaggttttctcgactttcacgggcgctacggtgccttgctgttcaagtcgaaaatccacctgcttggaatcaaaggtagatgaccaattggagtccgcagc

SEQ ID NO: 15559 - RNA, 230 nt, Paraburkholderia phytofirmans
  source 1..230: mol_type = other RNA; note = Related to NZ_CP014579.1
gctgagagcgtccggataatcaccatctagcgtatccctcgttctacggggcgagggcttgatctcgggcgaccgaggtctcagggcactggattaccggtgctcgatggcagaacttgcgcttactggagtaacccaccaccacacgaccagcgtcgtggcctcgcggcgatggcggtgggtttcgccagggcgaattcaaaggtagatggtgaactggcgctcccagc

SEQ ID NO: 15560 - RNA, 223 nt, Burkholderia anthina
  source 1..223: mol_type = other RNA; note = Related to NZ_CADETV010000001.1
gctgagggcgtccaaatagtcaccacctagtgtatccctccttcgggagggctcgatctcgggtgactgagatctcagggtactggattaccggtgcttgatggcagaacttccgcttactggagtaacccaccaccagcgaccagcgtcgtggccttgcggcattggcggtgggtttcgccagggcgaattcaaaggtagatggtgaactggcgcgctcagc

SEQ ID NO: 15561 - RNA, 225 nt, Acidovorax sp.
  source 1..225: mol_type = other RNA; note = Related to QBTZ01000001.1
gctgagagtaccgatttagtgatagtctagtttccatagggaggcaactccctgtggtcgagccgtagcttttgctgtggcgaggcttaggagtccgaaagccgaatttgaacttgcgcctacttgcgccgtctcctgcagctggctaccagcgtgtcctcgggccagagcaggagacgtcccgcgagcgggaccaaaggtagatgaaccactggaactctcagc

SEQ ID NO: 15562 - RNA, 228 nt, Noviherbaspirillum sp.
  source 1..228: mol_type = other RNA; note = Related to NZ_LMHZ01000013.1
gctgagagagccgtattagtggaaagctagaatccataaggggtaacccttgtggctgaaccttagctatatgttgaggtgaggtgtaggatgtccgaacaccaatgattgaaccggcgccaacttgaggacgcctcccgagtctggctaccagcgtaacctcgggtcagatcgggaggcgccccgcaaggcggggccaaaggtagatgaaccactggcaatctcagc

SEQ ID NO: 15563 - RNA, 223 nt, Xylophilus ampelinus
  source 1..223: mol_type = other RNA; note = Related to CABFMN010000087.1
gctgagagacccggtgtagaaaatctagtgtcccctggctatgtccagggaggcggacccgagtgatcgggtctgcgggacgcggattccgcgcaacctcggacgaactgccgctttactggaggatcagaaccgccaacactcgccgcgtggccttgcggttctggcggtcctggcccgccagggcgggctcaaaggtagatgacttcctgggactctcagc

SEQ ID NO: 15564 - RNA, 213 nt, Massilia rubra
  source 1..213: mol_type = other RNA; note = Related to NZ_VUYU01000002.1
gctgaggttgccgtctacatccatttagtcaccgcctgtgctgttcggcaggcaggggaccggattcccgcgtcccttaaaagaaactcacgctttacggaacctttgagcctcgctcagaggcttcgctgtggatgtcttgctcatgagcgagtctcaaaccctccatgaatgtcaacaagtgtaaatgaatgacacactggcaatctcagc

SEQ ID NO: 15565 - RNA, 213 nt, Massilia rivuli
  source 1..213: mol_type = other RNA; note = Related to NZ_WKJJ01000024.1
gctgagattgccgtcaaaatccatttagtcacggcctatgctgttggtaggcagggggccggattcccgcgccccttgagaggaacttacgctttacggaacctttgagcctcgctcaaaggcttcgcggtggatgtctggcgaatgagcgaggctcaaatcctccatggaatgtcaacaaatgtaaatgaatgagtaattggcaatctcagc

SEQ ID NO: 15566 - RNA, 224 nt, unidentified
  source 1..224: mol_type = other RNA; note = Related to JAAUUP010000100.1; note = Deltaproteobacteria bacterium
ggtgcaggcgaccacgccacgactagcggctctccggagcgggatacacttctgtgttcccaggcaacgcggattgctgcgttgctttgataaatcaagcgcttgtaaggcctccggcccgatcgacgcccgcgagctcctcgcagccttggcgcttggcgccgatcgagcccgagctaacgctcggtcgacgtagggggtagttgtggcgtggtcaccgcacc

SEQ ID NO: 15567 - RNA, 214 nt, Mesorhizobium sp.
  source 1..214: mol_type = other RNA; note = Related to JAIUHI010000001.1
gttgagggctcggtgagggagtttagaaatgcgccgcgcaagcggcgacgggttcctggggaacctggggctagggatttcccgggtccatacatcggagcaggaccttcgcgctgcgcgagacagcaagtcacggctggcggagtcttggacgagacttgctatcccacccacctgagtgggtcgaagtagatgtccgcaccgagccctcaac

SEQ ID NO: 15568 - RNA, 214 nt, unidentified
  source 1..214: mol_type = other RNA; note = Related to JAAYVT010000069.1; note = Phyllobacteriaceae bacterium
gttgagggcccggtgaagagatttagaaatgcgccgcgcaagcggcgatgggttccgtgggaacccagggccagggatttcccgggtccgtgcatcggagcaggaccttcgcgctgcgcgagacaacaactctcgactggcggggtcttggacgagacttgctgtcccacccacctgagtgggtcgaagtagatgtctacgccgagccctcaac

SEQ ID NO: 15569 - RNA, 214 nt, Lichenicoccus roseus
  source 1..214: mol_type = other RNA; note = Related to NZ_VCDI01000012.1
gttgagggcccggtgagggcatttagaaatgcgccgcgcaagcggcgtctggtcccttggggacctggggcttgggattccctgagcccgcgcatcggagcaggaccttcgcgctgcgcgagacagcaagtctcggctggcggagtcttggacgagacttgctgtcccacccaccccggtgggccgaagtagatggcagcgccaagccctcaac

SEQ ID NO: 15570 - RNA, 214 nt, Sphingobium sp.
  source 1..214: mol_type = other RNA; note = Related to NZ_CP010954.1
gttgagggctcggtgacagcatttagaaatgcgccgtgcaagcggcgacggttccctcggggagccggggtccaggatttccggggtccacacattggagcaggaccttcgcactgcgtgagacagcgagtctctgcgggcggggtcttggttgatactcgctgtcccacccaccatggtgggtcgaagtagatgcctgttccgagtcctcaac

SEQ ID NO: 15571 - RNA, 214 nt, Acetobacter persici
  source 1..214: mol_type = other RNA; note = Related to NZ_BAJW01000019.1
gttgagggcccggtgacgccatttagaaatgcgccgtgcaagcggcgactgatcccttggggatctgggactccggattcccggagttcgcacatcggagcaggaccttcgcactgcgtgagacagcaagtctcggctggcggggtcttggttgagacttgctgtcccacccacctcggtgggtcgaagtagatgccagtgccgagtcctcaac

SEQ ID NO: 15572 - RNA, 214 nt, Rhodovulum marinum
  source 1..214: mol_type = other RNA; note = Related to NZ_SLXP01000012.1
gttgagggctcgatgacgtggtctagaaatgcgctgcttcggcagcgacgggtcccttgggggcctggaacgtcggatttccgacgttcgcaaagaggagcggagtattcacgctgcgcgatactgcacgtcacgcctggcggtgtcttggccgcgacgcgcagtaccacccacccgggtgggtcaaagtagatgccggcgccgaaccctcaac

SEQ ID NO: 15573 - RNA, 214 nt, Sphingobium subterraneum
  source 1..214: mol_type = other RNA; note = Related to JACIJP010000010.1
gctgagggctcggtgagggggtctagtaatgcgccgcttcggcggcgactggtccttttgggacttggggcatcggactaccggtgctcgttagaaggagcggaatattcacgctgcgcgatgctgcgaataacgcctggcgaagtcttggccgatatccgcagtatcacccacctgggtgggtcaaagtaggtgtcgttgccgagctctcagc

SEQ ID NO: 15574 - RNA, 214 nt, Sphingomonas paucimobilis
  source 1..214: mol_type = other RNA; note = Related to JFYY01000007.1
gctgagggctcggtgagcgggtctaggaatgcgccgcttcggcggcgacgggtccttttgggatctggggcgctggattaccggcgtccgctaggcggagcgaagtattcacgctgcgcgataatgcacgtcgtgcctggcgaagtcttggtcgcgacgcgcattaccccccacccgggtgggtcaaagtagacgatgccgccgggtcctcagc

SEQ ID NO: 15575 - RNA, 214 nt, Sphingomonas albertensis
  source 1..214: mol_type = other RNA; note = Related to NZ_JACONT010000017.1
gctgaggagtcggtgaggccggctaggaatgcgccgcgcgagcggcgactggtcctcttgggatctggagcgtcggatttccggcgttcgaaaagtggagctgggccttcgcgctgcgcgagactgcacgtcacgccggtcggggccttggttgcgacgcgcagtcccaccccccggggtgggtcgaagtagatgcccgcgccggctcctcagc

SEQ ID NO: 15576 - RNA, 213 nt, Methylobacterium goesingense
  source 1..213: mol_type = other RNA; note = Related to NZ_BPQL01000193.1
gctgagggatcggtgattctatctaggaatgcgtcgcggaagcgacgacggttcttgaaggaactggagcgccggatttcaggtgctcggaaagcggagcgtccctattacgctgcgcgttacagcaagcatcacctcgcgccgtcttgggcgatgctcgctgtttcacccacccaagtgggccaaagtagatgaacttaccgaaccctcagc

SEQ ID NO: 15577 - RNA, 214 nt, Bradyrhizobium sp.
  source 1..214: mol_type = other RNA; note = Related to NZ_CP030037.1
gctgagggcccggtgagggcgtctaggaatgcgccgcgagagcggcgacgggctcctcgggggcctggggcaggggatttcccatgtccgcaaagcggagcgttatcttcgcgctgcgcgttactacgagacacgcctggcggcgtcttggtcgagcctcgtagtatcacccaccatggtgggtcgaagtaggtgtccctactgagctctcagc

SEQ ID NO: 15578 - RNA, 213 nt, Rhizobium tibeticum
  source 1..213: mol_type = other RNA; note = Related to FNXB01000037.1
gctgagggctccatgagggtgattaggaatgcgccgcgaaagcggcgatgggcatcacggatgtccagagtaccggattctcgatgctcgtctcgcgtagcgacattttcatgctgcgcaatggcacgagcctttcccggcggcgtcttgggggcgcctcgtgccattacccaccgaatggggtcaaagtaatgcaatcgtggagccctcagc

SEQ ID NO: 15579 - RNA, 213 nt, Sinorhizobium meliloti
  source 1..213: mol_type = other RNA; note = Related to RPNF01000004.1
gctgagggctccatgagggtgattaggaatgcgccgcggaagcggcgatgggcatcctggatgtccagagcatcggattctcgatgctcgtctcgcgtagcgacattttcatgctgcgcaatggcacgagcctttcccggcggcgtcttgggggcgcctcgtgccattacccaccgtatggggtcaaagtaatgcaatcgtggaaccctcagc

SEQ ID NO: 15580 - RNA, 216 nt, Agrobacterium sp.
  source 1..216: mol_type = other RNA; note = Related to LXKM01000017.1
gctgagggccccatgacagtagttaggaatgcgccgcgaaagcggcgatgggcgtcgttgtggatgcctagggtatcggattctcggtactcgtctcgcgtagctactttttcatgctgcgcaatactgcgagccttgcctggcggtgtcttggttgcgcctcgcagtattacccaccgatttgggtcaaagtaatgcagtcgtggagccctcagc

SEQ ID NO: 15581 - RNA, 213 nt, Rhizobium terrae
  source 1..213: mol_type = other RNA; note = Related to NZ_QJKM01000019.1
gctgagggctccatgacagcgattaggaatgcgccgcggaagcggcgatgggcaccacgggtgtccagagcatcggattctcgatgctcgcttcacgtagcttgtttttcatgctgcgcactggcacgagcctttaccggcggcgtcttaggtacgcctcgcgccagtacccaccgaatggggtcaaagtaatgcaagcatggagccctcagc

SEQ ID NO: 15582 - RNA, 217 nt, Caulobacter sp.
  source 1..217: mol_type = other RNA; note = Related to PEGF01000002.1
gctgagggttccttgagggcaattaggaatgcgccgcgaaagcggcgatgggcttcttcgcggaagcctagggcgtcggattctcggcgctcgtctcgcgtagctctcttttcatgctgcgcaatactgcaagcctttcctggcggtgtcttgggtgcgccttgcagtattacccaccggagtgggtcgaagtaagtgtcgtcctggaaccctcagc

SEQ ID NO: 15583 - RNA, 216 nt, Marinobacter vinifirmus
  source 1..216: mol_type = other RNA; note = Related to NZ_NEFY01000006.1
gctgagggctctatgaaagagattagatatttgccacgaaagtggcaaggggttccttctgcggagcccagggtatgggagttcctgtgctcagatcgcggagcagtcttttcatgctgcgcttcagtgcgatctagcccgggcgatgtcttagggctagatcgcactgatccccaccgaggtgggtcaaagtaatgtctttctggagtcctcagc

SEQ ID NO: 15584 - RNA, 216 nt, Rheinheimera sp.
  source 1..216: mol_type = other RNA; note = Related to NYXE01000056.1
gctgaggacttcatgatcgagattagacatttgtcacgagagtggcaaggggttctgtttttgggaccctggatgcgggagttcctgcattcgtttcgcggagctgtattttcatgctgcgcattagtgcgcgttagcccaggcgacgtcttcaggctaacgcgcactaatccccaccgaggtgggtcaaagtaatgtcttcatggagttctcagc

SEQ ID NO: 15585 - RNA, 216 nt, Longimicrobium terrae
  source 1..216: mol_type = other RNA; note = Related to NZ_JACHOW010000011.1
gctgagggctccatgaccgggattagtactgcgccgcgaaggcggcgctgggctttcatcgcaaagttcagggtgcgggagttcccgcacccatctcgcggagctctgtattcatgctgcgcagcagtccaactctggcctggcggggtcttggtccagactcgcactgtcacccacccggggtggtcaaagtaatgccggcatggaaccctcagc

SEQ ID NO: 15586 - RNA, 211 nt, Bosea sp.
  source 1..211: mol_type = other RNA; note = Related to NBDP01000036.1
gttgagggctccgtagtgtcgtctagcaatgcaccgcgcaagcggtgccgggtttcacaacccgggatgcgggatttccggcattcgtcaaaaggagctgagccttcgcgctgcgcgaggcagcaagcaaaaccaggcggtgtcttgggccttgctcgctgtctcccccacctatgtgggccgaagtagatgcgcattacgagccctcaac

SEQ ID NO: 15587 - RNA, 211 nt, Mesorhizobium sp.
  source 1..211: mol_type = other RNA; note = Related to RCIZ01000007.1
gttgagggctccgtagtgacgtctagcaatgcaccgcgagagtggtgccgggctttcgggcctggaatgcgggatttccggcattcgttaagcggagctgatccttcgcgctgcgcgaggcaacaagaaacaccggtcggtgtcttcggccttcctcgctgcctcccccacctatgtgggccaaagtagatgcgcattacgagccctcaac

SEQ ID NO: 15588 - RNA, 214 nt, Pseudooceanicola nitratireducens
  source 1..214: mol_type = other RNA; note = Related to NZ_JAHVKC010000001.1
gttgagggcgccgtgaggccgtctaggaatgcactgcgcagccagtgctgggtctgttacgacccagggtgttggatttccggcgctcgtaaagcggagcaggttcttcgcgctgcgcggtatggcaagcaaagcctgtcggtgtctccggcagtccttgccataccccccaccttaggtgggccgaagtagatgcgccaaacgagccctcaac

SEQ ID NO: 15589 - RNA, 214 nt, Rhizobium leguminosarum
  source 1..214: mol_type = other RNA; note = Related to WIEL01000040.1
gctgaggattccgtgatgtcatttagcatagcgccattaacgtggcgccgggtccacatgtttgggcccggggaatcggatttccgagaccctttgaaggagcgaagatttacgctgcgcgatcaccaaagcatcttgggcggtgtcttgggcgcttcttcggtgttcccccaccccgagtggtcaaagtagatggctcgctggaatcctcagc

SEQ ID NO: 15590 - RNA, 214 nt, Ponticaulis sp.
  source 1..214: mol_type = other RNA; note = Related to NZUJ01000046.1
gttgagggctcggtgatacgatttagcatttcgtggcacttgccacggttggccctcgcgggcatggggaatgggatttcctgttctctgccagaagaacacacatatttcgcttcgcgtctgttgaaacacagagcggcgaagtcttactttgtgttccaacagtcacccaccacaggtgggacgaagtaaatgcgttttccgagccttcaac

SEQ ID NO: 15591 - RNA, 247 nt, Novosphingobium sp.
  source 1..247: mol_type = other RNA; note = Related to NZ_JABVZR010000001.1
tctgagggttccacggtagcatctagctattgtcatccgagagggtgaccgtgatggtggatacgaatccattgtcgtggggaatggagttttccattgccgttgaaagagcacgtgaatgcaggtccacgccggatcatccatcattgcccttcgggcaacctcctcggaacggctcggtttgatggacgatccggcgccgccagggccgcgctaaagtagatggctcatccgtgggatcctcaga

SEQ ID NO: 15592 - RNA, 247 nt, Agrobacterium tumefaciens
  source 1..247: mol_type = other RNA; note = Related to JAALZB010000008.1
tctgagggttccaaaaggtagcatctagctactgccacccgcaagggtggccaggatgatgagtacgaacttatcgtcatggggaatagggtttcttattgccgctgaaagagcacaagaatgcaggtccacgcaggatcatccatcattgccctttgggcaacctcctcggaggctcggtttgatggacgatcctgcgccgccagggccgcgctaaagtagatggctcaccgttgggaccctcaga

SEQ ID NO: 15593 - RNA, 245 nt, Mesorhizobium sp.
  source 1..245: mol_type = other RNA; note = Related to VFSZ01000005.1
tctgagagtcccacgctagcgtctagctattgtcatccttcgggatggccgtgatgatggatacgaatccattgtcttggggaatggagttttccattgccgctgaaagagctcgtgaatgcaagtccacgtcgcgtcatccatcgttgcctttcaggcaacctcctcggaggctcatttcgacggacgacgcgacgccgccagggccgcgctaaagtagatgccgtatcgttgggactctcagg

SEQ ID NO: 15594 - RNA, 245 nt, Caulobacter sp.
  source 1..245: mol_type = other RNA; note = Related to NZ_QDKO01000010.1
actgagggctccacggctcttgtttagcgcccgccgctcttcggagcggccgtgatggtcggtacgaaccggctatcgtgggtgatcgggtttccggtcgccgttgttagagctgccgatcgcaggtccacgtcgcttcctccttcgttcctttcaggaacctcctcgtgaggctcggttcgaaggacgaagcgacgccgccaggcctgggttcaagtagatgagacacccgtggagctctcagc

SEQ ID NO: 15595 - RNA, 244 nt, Ochrobactrum sp.
  source 1..244: mol_type = other RNA; note = Related to PCOO01000001.1
gttgagagacccaagggtgtcatttagcaaccgccgcctcacgaggcggccaaggtgacccgctttggtgtaggtcgccttggcggcagggtttcctgtcgccgtagatggagctgtcgaatactggtatcctacccagcgcgtcagtcgcgagcgacacattcggcaagcgtcgaaatgaacccgctgggcaggacaccccacaggggtgtaaggtagatgctgcatccttgggactctcagg

SEQ ID NO: 15596 - RNA, 240 nt, Pseudovibrio sp.
  source 1..240: mol_type = other RNA; note = Related to NZ_LMCH01000057.1
actgagagcttccaaggtgctatctagtacccaccgctcgaaagggcggtcatgacgattacttacactgatcgtctggggcactggggtttcccagcgccgtcgatggagcgcatgattgcacgtctctgggcaaagaaagcagtcccggagggacacagtcgtatgccttcattgcttcctttgcccaaagcacccgttccgggtgaaagtagatgaagcatccttgggactctcaga

SEQ ID NO: 15597 - RNA, 240 nt, Martelella lutilitoris
  source 1..240: mol_type = other RNA; note = Related to NZ_CP066786.1
cctgagagcttccaaggtgccatctagtactcaccgttcgaaagagcggtcatgatggttacttacactaatcgtcaagggcactggggtttcccagcgccgtcgatggagcgcatgattgcacgtctctgggcaaagcaagcagtcccggagggacacagtcgtttgccttcattgcttcctttgcccacagcacccgtaccgggtgaaagtagatgaagcatccttgggactctcaaa

SEQ ID NO: 15598 - RNA, 234 nt, unidentified
  source 1..234: mol_type = other RNA; note = Related to JAEUMP010000012.1; note = Hyphomonadaceae bacterium
tctgagggttccgcggaggccacctagcgtacgccgtccttccgggcggccatgacgaccgaccgaagttggttgttagggccttggggcttcccttggccatgtcggagcatctgaagacaggttccgtatcatcatcgcgtccctacgggtccattcgaaggctcataagcgacgatgatgcgcatcctgcgccgggcaaaatgtagatgagccatccgtgggactctcaga

SEQ ID NO: 15599 - RNA, 226 nt, unidentified
  source 1..226: mol_type = other RNA; note = Related to VGDE01000018.1; note = Alphaproteobacteria bacterium
gttgagagttccaagaggcgggtctagcaatgccagtcgttgactggccaagatggggacacctgtcatgggcatctgggtttctgggcgccgctgagagagctgatgaataactgcacctatatgccagtccacgccggaggtacgttcgggagactcaccgtggaccggcatatagcccttcgggccgaactaaagtagacgatgcaagcttggaactctcaac

SEQ ID NO: 15600 - RNA, 247 nt, Agrobacterium tumefaciens
  source 1..247: mol_type = other RNA; note = Related to JXQV01000002.1
tttgagagaaccaagggtgctcacatctagtgttcgccgctcttcggagcggccaagatgatgcgtccatgcgtatcgtcatgggtggtcgggtttccggccgccgttgaaagagctgatgattgtagtctgttgcctgtcgattccagtcgcaagcgacatcactcggtcaccggctcgtttggaaccgacaggcatcaccccatccggggcggaaggtagatgctgcatccttgggactctcagc

SEQ ID NO: 15601 - RNA, 247 nt, Rhizobium populisoli
  source 1..247: mol_type = other RNA; note = Related to NZ_JAHYCB010000008.1
tctgagagaaccaagggtgctcgcatctagtgttcgccgctcttcggagcggccaagatgatgtgtgtatgcgcatcgtcgtgggtggccgggtttccggtcgccgttgaaagagctgatgattgtagtctgttgcctgtcgatcccagtcgcaagcgacatcactcggtcaccggctcgtttggaaccgacaggcatcaccccgtccggggcggaaggtagatgcggcacccttgggactctcaga

SEQ ID NO: 15602 - RNA, 258 nt, Acetobacter tropicalis
  source 1..258: mol_type = other RNA; note = Related to NZ_LHZT01000085.1
gttgagggttccaaccgaggtctagataccggtctcgcaaagcgagaccaccgtcagtggtgggattttccgtcactaccggcttccgggtttcttgttgccgaggaaagagcttccgatcgcaggtcctggtcctgtgcgctcgcccccctttgggggggcgtttcgtagagggggtgtgtcgtatgactcactcgagcccacaggacccgcacatgtgcggagattaaaggtagatgctcagttggaaccctcaac

SEQ ID NO: 15603 - RNA, 217 nt, Rhizobium leguminosarum
  source 1..217: mol_type = other RNA; note = Related to JAAXBO010000012.1
gttgcgaggttaatagtttgaacgagacgctcgtgctcacgagatcggtgacgggcctatggcctgttgggttaggattgccgaaacccgccggacgagccactgcaaagcctagcggctgtgtgagcgtttctagctcgtggcgaacgccttacggcgaaacgctcacgcaaacgcactgatcggccaaagtcgatgaattatttgacctcgcaac

SEQ ID NO: 15604 - RNA, 214 nt, Rhizobium leguminosarum
  source 1..214: mol_type = other RNA; note = Related to NZ_CP090091.1
gttgcgaggatgatagtttgaacgagacgctcgtgctcacgagatcgacaggccacgcgcctgttgggttaggattgccgaagcccgtcggacgagccaccgcaaagcctagcggctacgtggacgtttcctgcccgcggcgaatgccttacggtgaaacgcccacgcaaacgcactgatcggctaaagtcgatgaactacataacctcgcaac

SEQ ID NO: 15605 - RNA, 214 nt, Rhizobium gallicum
  source 1..214: mol_type = other RNA; note = Related to NZ_CP092346.1
gttgcgagggtgatagtttgaacgagacgctcgtgctcacgagatcgacaggcgaggagcctgttgggttaggattgccgaagcccgtcggacgagccactgcaaagcctagcggctgtgtgagcgtttctatatcgtggcgagagccttacgacgaaacgcccacgcaaacgcactgatcggccaaagtcgatgaattatctcacctcgcaac

SEQ ID NO: 15606 - RNA, 229 nt, Erythrobacter sp.
  source 1..229: mol_type = other RNA; note = Related to NZ_CP065229.1
gctgcggggttaagcaggccacgagagaagctcgtgctcacgagagcgattggacggtcgccgcaaggaaccgttcaattgggttaggattgccgaagccctacggtcgagccaccgcccagccattcggctgggcacgcatcggcttaacgcccgagcgccgggctaccgacgcgtgcccagacgaacccattcgggtcaaagtcgatgtccagtttctctccgcagc

SEQ ID NO: 15607 - RNA, 229 nt, Blastomonas sp.
  source 1..229: mol_type = other RNA; note = Related to NZ_CP016461.1
gttgcggggttaagcagggccacgagagatgctcgtggtcacgagagcgattggacggtgccgcaaggggccgttcaattgggttaggattgccgaagccctacgatcgagccaccgcccagccattcggctgggcacgcatcgtcttaacgcccgaacgccgggctaacgacgcgtgcccagacgaacccattcgggtcaaagtcgatgcccagtttttccccgcagc

SEQ ID NO: 15608 - RNA, 237 nt, Pseudomonas salomonii
  source 1..237: mol_type = other RNA; note = Related to NZ_JACAQV010000005.1
gctgagagcgccagactgacgtttctagtgttggtacggcgacgtacccggtatcagatgatgatgcaatgggggacatactttgtccttttcggagtagcatgcgcttaagtgtaagtatcaacccgccttcgcaattgcgaaagtgcatgctcggtcgcaagctcgcctcgcctctcggcgggctgattctcacccttcgggtgtcaaagtagatgtcagtctggcgcgctcagc

SEQ ID NO: 15609 - RNA, 237 nt, Pseudomonas viridiflava
  source 1..237: mol_type = other RNA; note = Related to NZ_UWGW01000546.1
gctgagagcgccagactgacgtttctagtgttggtacggcgacgtacccggtatcagatgatgatgcaatgggggacatactttgtccttttcggagtagcatgcgcttaagtgtaagcatcaacccgccttcgcaattgcgaaagtgcatgctcggtcgcaagctcgcctcgcctctcggcgggctgattctcacccttcgggtgtcaaagtagatgtcagtctggcgcgctcagc

SEQ ID NO: 15610 - RNA, 231 nt, Pseudomonas chlororaphis
  source 1..231: mol_type = other RNA; note = Related to NZ_CM001559.1
gctgagagcgccagactgacgtttctagtgttggtacggcaacgtacccggtatcagagatgatgcatttgggggacatattttgtcccttacggagtagcatgcgcttaagtgtaagcatcaacccaccttcgcaaaagcgtatgctcggtcgcaagctcgcctcgcagctcggcgggttgattctcacccttcgggtgtcaaagtagatgtcagtctggcgccctcagc

SEQ ID NO: 15611 - RNA, 227 nt, Pseudomonas viridiflava
  source 1..227: mol_type = other RNA; note = Related to NZ_UWJA01000102.1
gctgagggcgccggattgattcttctagattggtatggcgacatacccggtatctgatgatgcataggaggacatattttgtcctttacggagtagcatgcgcttaaagtgtaagcatcaacgcaccttcgcccataggccactcggtcgcaggctcgcctcgctgctcggcgcgctgattctcacccttcgggtgtcaaagtagatgacagtttggcgtcctcagc

SEQ ID NO: 15612 - RNA, 236 nt, Pseudomonas fakonensis
  source 1..236: mol_type = other RNA; note = Related to NZ_CP077076.1
gctgaggtagccagattgttccatctagaatggcgtggtgacacgcccggtatcaactgatgatgatgctattgaggacatattttgtccttttcggagtagcgtgcgcataagtgtaagcatcagcgcaccttcgcccactgagggcccctcggtcgcaagctcgcctcgatgctcaggcgcgctgtttctcaccctgcgggtgtcaaagtagatggcaatctggcgacctcagc

SEQ ID NO: 15613 - RNA, 229 nt, Pseudomonas syringae
  source 1..229: mol_type = other RNA; note = Related to NZ_FOTU01000001.1
gttgaggtagccagattgatctatctagcatggcatggtgacatgcccggtatcagtgatgatgctatggaggacatattttgtccttttcggagtagcgtgcgcttaagtgtaagcatcagcgcaccttcgcccacaggccactcggtcgcaggctcgcctcgttgctcaggcgcgctgtttctcacccttcgggtgtcaaagtagatggcaatctggcgtcctcaac

SEQ ID NO: 15614 - RNA, 229 nt, Pseudomonas viridiflava
  source 1..229: mol_type = other RNA; note = Related to NZ_UUET01000191.1
gctgaggatgccagactgacctatctagaattgcacggtgacgtgcacggtatcatcgatgattctacggggggcatattttgtccttttcggagtagcttgcgcttaaagtgtaagcagcagcgcaccttcgaccgcaggccactcggtcgcaagctcgcctcgtttctcggcgcgctgcttctcacccttcgggtgtcaaagtagatggtggtctggcgttctcagc

SEQ ID NO: 15615 - RNA, 230 nt, Burkholderia cepacia
  source 1..230: mol_type = other RNA; note = Related to NZ_LPFA01000028.1
gctgagggcgtcggattagccatctagtgatggcatggcaacatgcccggcgactgcccttcggggcggccatgggacacatattttgtgctccttcgacgcagcaggcgcaaacgtgtaagcatcgtcgcgatccgctacgctgtgtacctctgcgctcgtcttgctgcgaaccgcgacgatcctcacccttcgggtgtcaaagtagatggctatctggcgcgctcagc

SEQ ID NO: 15616 - RNA, 221 nt, unidentified
  source 1..221: mol_type = other RNA; note = Related to PBYJ01000011.1; note = Oceanospirillaceae bacterium
gctgaaggcgccagtgagctccatctagcattgcatggaaacatgcacaaaggctgttgatgtaagaacagtcggggacgcatattttgcgatcctttgatgtagcagacgctaatgtgtaagcatggtcgcgattcggcggccgctacgaggtcttgctgcgaaccgcgaccatcctcaccccaaggggtcaaagtagatgaatcactggcgccctcagc

SEQ ID NO: 15617 - RNA, 240 nt, Escherichia coli
  source 1..240: mol_type = other RNA; note = Related to CP059835.1
gttgaggaggccataatgtttcatttagcgttaacacaagtaactaccattacttgtcaggagaagtgtatacctttcctgcgggccatatattttatgtgctcatgtattagcactcgcaatagtgtaagcaaaatcacgacgatcccgacttcgtcggctcgatcgtggtctttcttatcgccgcgattttacttaccccttcggggtcaaagtaaatgaaacaatggtctcctcagc

SEQ ID NO: 15618 - RNA, 240 nt, Yersinia enterocolitica
  source 1..240: mol_type = other RNA; note = Related to NZ_CP011118.1
gttgaggaggccataatgtttcatttagcgataacacaagtaacttgcattacttgtcagaagaagcatatgcctctcctgcgggccatatattttatgtgctcatgtattagcactcgcaatggcgtaagcaaaatcacgacgatcccgacttcgtcggttcgatcgcggtctttcttatcgtcgcgattttacttacccctccggggccaaagtaaatgaaacaatggtctcctcagc

SEQ ID NO: 15619 - RNA, 243 nt, Acinetobacter baumannii
  source 1..243: mol_type = other RNA; note = Related to CP018254.1
gttgaggagaccataatgtttcatttagcgttcgctcaagtaactattacagttacttgtctgattagttttaaactcaatcagtcggctatattctatataagcccaagtaatagctctcgcaaaagagtaaccaagatcacgacaatagcgactaaagtcgctcgattgtgtcctcacttattgtcgcgatcttacttacccctccggggccaaagtaaatgaaatcatggtctcctcagc

SEQ ID NO: 15620 - RNA, 246 nt, Photorhabdus tasmaniensis
  source 1..246: mol_type = other RNA; note = Related to NZ_PUJU01000037.1
gttgagaggaccatcataatgttttatttagcgtcttcacaagtgacaccattcacttgtccagtaactacaaagtgtaaactgggggccgtatactttacgtgctcatggaatagctctcgcattagtgtaagcgggatcgacgcaataccgacgatgtcgggtgaaacgcagacttatctattgcgccgatccccctcaccccttcggggccaaagtaaatgagacaacggtggtcccctcaac

SEQ ID NO: 15621 - RNA, 209 nt, Vibrio fluvialis
  source 1..209: mol_type = other RNA; note = Related to NZ_CP073273.1
gctgagggcgtcagattagatctagcgttgtaaacttaaacagtttacggggaagcatattttgcaaccttcggagcagcagaggcaaagtggagcgttgaggcatttacttcgcggccactcgtagactcgttgcgaataaaatacctcaatgctccctatcaagagcgaaaagtagaagtagatgaataatatttggcgtcctcagt

SEQ ID NO: 15622 - RNA, 212 nt, Photobacterium damselae
  source 1..212: mol_type = other RNA; note = Related to JACFTX010000002.1
tctgagggagccatattaaatctagcattcgtaaaccactatatttatggtttactgggaagcatattttgcaaccttaggaaaagcaggggctatcgtggagcgttgtgtgatttttttcgcatttgctcgtagcctcgccctcaaaaatcacataaagctccagatcaagagcgaaaagtaagagtagatgaataattggcgccctcagc

SEQ ID NO: 15623 - RNA, 325 nt, Oceanospirillum beijerinckii
  source 1..325: mol_type = other RNA; note = Related to NZ_KE383828.1
gctgagggttccagtttgagttttctagcattagtgccaacaggcatctaagtagtcatacaaaagtttttcggcactattgtctctacccttataaaccaccggatggtgaaggtggaaaacttatgtaagactgcttattaagtgatcaaggatgtttgcttagtttaatggtcgcatattttgcgtaccttagtaatagcagacgcatagtgtcagtatagtcgcgattcaacggtctctcgtgcttcgcgcctcaatgctgaaccgcgactattctaacccaagggttaaaagtagatgtacaaaaactggaatcctcagc

SEQ ID NO: 15624 - RNA, 208 nt, Idiomarina baltica
  source 1..208: mol_type = other RNA; note = Related to NZ_CH672406.1
tttgggagctcctctctattaatctagcgaatacaggctgttagcctgtcaattttgaggagcatgttgttttctcattgagcgagccgccgcttagagtctaagtgagactcacagccacctaaaggctgtggtcgtcgactctctgctgcgagtctcatttaccctccttacggataaaagtagatgaatagatggagctcccgag

SEQ ID NO: 15625 - RNA, 260 nt, Alishewanella agri
  source 1..260: mol_type = other RNA; note = Related to NZ_AKKU01000003.1
actgagagctctaaatggagtttagcttgaaccaatgtaaaatgcattcgtctgtagaccaatgtgttaagcatttctctcataattttattatgagtagaggggagtcagagtctgtcctccttggaaatagcatccgattgatgctaagcatgaccacgcaattccgactgcgtcggatggcgtcgaggccttgcctaatcgcgcggtcctcctcaccctgcgggtgtcgaagtaaatgaacagatggagctctcagt

SEQ ID NO: 15626 - RNA, 219 nt, Gluconobacter oxydans
  source 1..219: mol_type = other RNA; note = Related to NZ_LCTG01000001.1
attgagagtctcgtgagggtatttagctcctgcgcaagcaggcgtgatgctgggcatccctgtccggtgttaccggcgtttgtatttcgagcgctgccgaatgagcctccgcataggccttatcgctcgtcctccgcttgggctgcgatgggcttgctgcggagtacgaacgacaagtccatggtcctagagggtaaatgactttgtgggactctcaag

SEQ ID NO: 15627 - RNA, 220 nt, Sphingomonas sp.
  source 1..220: mol_type = other RNA; note = Related to NZ_JSXI01000043.1
gctgagagtctcatgaggacgtttagttcctgcgaaagcaggcgtgatgccgggcatccctgtccggcgtcaccggcgaccgtatttcggtcgctgacgagcgagcctccgcataggccttatcggtcacgctccgctcggggctgcgataggcttgccgcggagcgcgaccgaccagtccatgatcctagagggtagatgaccttgtgggactctcaaa

SEQ ID NO: 15628 - RNA, 236 nt, unidentified
  source 1..236: mol_type = other RNA; note = Related to JAFKFG010000027.1; note = Alphaproteobacteria bacterium
gctgaggattccttgatttgtaactagcacccttcccaaccgaaaggcggaagggcagtgttgggtggcatccctgtcatcctactgtggcgcttgtgtttcgggcgctttctgattgagcgtaagcaaaaagccttgtttgtcttcgctagactcgcatcgcacggctcgcggtcgagcgaagacaatcaacgccatgaacagacgaaggtagatgcaaaattggaattctcagc

SEQ ID NO: 15629 - RNA, 232 nt, unidentified
  source 1..232: mol_type = other RNA; note = Related to JABMRO010000623.1; note = Planctomycetes bacterium
attaaggaactcagcgagttcatttagttcaggttccctgggaagggaactaccatgactataggcttatcgcttattgttatggggaaactggattaccagttttctcggttaaagcgtgcgcatgtcactaaggttgtgcacgctacggctttctctacgtgcggcttgaggcgcagcgtgcacagcctcacttcgtggaggtcaaagtaaatgaatcgctgggttccac

SEQ ID NO: 15630 - RNA, 237 nt, Desulfonauticus submarinus
  source 1..237: mol_type = other RNA; note = Related to NZ_FNIN01000001.1
attgaggggattaactgctttatctagtaaaactacctctttggaaaatggaggtagaaatgactgttaatttaacggtctggggatttggattaccaaatctctgtagaaaagcgggtgcttgcggactaaggcatgatgttgtgccgccttcggccgctcgatgtctcgctttgtcacaacatcatatcttacctctcaggaggtcaaagtagatgaagcgttggtcccctcatt

SEQ ID NO: 15631 - RNA, 264 nt, unidentified
  source 1..264: mol_type = other RNA; note = Related to JAGRCJ010000081.1; note = Caldilineaceae bacterium
gaggagtgttcgatagcaattttatctagtgtatgtcgacggcctttgccatcgaccccgtaaaaccgtgctgatttactagcctggtttggacaacaaaatattgttgtcttggtgaaagctcaggtttgtgctaaggcttgcgcgcactgcttcttccagcgatgtctcggcgcagtacgcgcattcctcgcatttgctggttaaaagatttagcaatatgcgatcaaaggaagtagataaatatgtcaatcggacctcctc

SEQ ID NO: 15632 - RNA, 209 nt, Comamonas thiooxydans
  source 1..209: mol_type = other RNA; note = Related to VTRK01000013.1
gttgagggaccgcaacgttggttagcgtttacctaggccattgttttcagcggcattggttggggcgcggatttcagctgccctttgaactagcccacgctttggcggatgcaagaggcgactctttcatccgtcgatgcctcgggtcagactcgcctctcccctccgccctgcggagtcaaagtagctaatgatgtggtcctctcaac

SEQ ID NO: 15633 - RNA, 209 nt, Pusillimonas sp.
  source 1..209: mol_type = other RNA; note = Related to NZ_CP049990.1
gttgagggaccgcagtgttggttagcgtttaccttggcctatgttttcagcggcatgggttggggcgcggattgccgctgccctctggaatagcccaagctttggcggatgttagaggcgactcttccatccttcggagcctcgggtcagactcgcctctcacttccgctctgcgtaattgaagtagctgacaatgtggtcttctcaac

SEQ ID NO: 15634 - RNA, 212 nt, Pelomonas sp.
  source 1..212: mol_type = other RNA; note = Related to JAKZFD010000012.1
gttgagagggcgcaccgttggctagcgttgacctggacctgtgttttcagcggcacaggttggggcgcggatttccgttgccctctgaagttgcccaggctatggcggatgcaagacgcgagtcatccatcctacgaagcctcgggtcagactcgcgtctcccctccgccggtcgtcggagtaaaagtagctaacgatgtggtcctctcaac

SEQ ID NO: 15635 - RNA, 212 nt, Acidovorax avenae
  source 1..212: mol_type = other RNA; note = Related to NZ_CP028294.1
gttgaggggccgcattgctggctagcgttgacctaggcctgtgttttaagcggcactggttggggctcggaattccgcagctctatgaaattgcccaagctttggcggatgtaagacgcgagtgcttcatccttcggagtctcgggtcagactcgcgtctctcctccgcctgtcgtcggagtaaaagtagctagcaatgtggtcctctcaac

SEQ ID NO: 15636 - RNA, 234 nt, Duganella sp.
  source 1..234: mol_type = other RNA; note = Related to JACEZU010000002.1
gttgaggagccacagcgagagttagtgtttaccacgtgccataccttcgggtgcaggcatgtacctttgccttcgggtttagggtggtggcggattccgcttcccattgaagtagcctacgcattgacggatgcgtagcacgactatccccgcgtcgcggactccgggttttagccgcgctacgcacccccgtacaaaacttaacgagagtaatcttaatgtggtctcctcgac

SEQ ID NO: 15637 - RNA, 204 nt, Parapusillimonas granuli
  source 1..204: mol_type = other RNA; note = Related to NZ_JACHHM010000011.1
gttgaagagccacggcaatggttagtgcttacctagacctgtgttttcggcattggttgggacgcggatttccgccgtcctctgatccagctctcgcactggcgaaattacacaccagtcctcctatccttcggggcctcgggtccgactggcgtgtacctccgcaagcggagtcgaagtagcttatgccgtggtctcctcaac

SEQ ID NO: 15638 - RNA, 203 nt, unidentified
  source 1..203: mol_type = other RNA; note = Related to SEEN01000026.1; note = Hyphomicrobiales bacterium
gttgagggaccacggtcatggttagtgcttacctagacccgtgtttacggcattggttgggacgcggatttccgccgttctttgatccagctctcgcactggcgaaattacgcaccagtcctcccatccttcggggcctcggggctgactggcgcgtacctccgcaagcggagtcgaagtaactatgctgtggtctcctcaac

SEQ ID NO: 15639 - RNA, 221 nt, Pseudomonas neustonica
  source 1..221: mol_type = other RNA; note = Related to RKKU01000049.1
gttgagaagatcacgttgaaggttagtgttcaccggagcaaccggagcgagcttgactcgtccattgctgctgtgggggcgcggagttccgctgcctttcgtagaagctttcgcaaggcggatgtcgagcacgactcaaccaacctgcggaagacttggggtggagccgcgctcggcttccactttcgtgtcaaagtagcctgacatgtggtcttctcaac

SEQ ID NO: 15640 - RNA, 230 nt, Pseudomonas veronii; identical to SEQ ID NO: 15499
  source 1..230: mol_type = other RNA; note = Related to NZ_CP018420.1

SEQ ID NO: 15641 - RNA, 221 nt, unidentified
  source 1..221: mol_type = other RNA; note = Related to PFJY01000128.1; note = Hydrogenophilales bacterium CG_4_10_14_3_um_filter_58_23
gttgagaagccaccttgttagttagtgtttaccggagcatgttgatcaggcctagcttgtatagcttgcttttgttggggtgcggagttccgctacccttcgtagaagcctacgcattgcggatgttgagcacgactcaactctcctgcggaggacttggggctgagccgtgctcagcgtccacagtcgtgtcgaagtaactgatatgtggtcttctcaac

SEQ ID NO: 15642 - RNA, 252 nt, Rhizorhabdus wittichii
  source 1..252: mol_type = other RNA; note = Related to CP021181.1
gttgagggctcctgtggagtcgcatagttgacgtcgccgcatcggctttgctggtgtttcgacggcaacatatggtcttcgggtcatatgtttcggggcgcagaatctgctgctctcaggacaagcctccgctcgatgctaaggcatatcgcgcaacgccgcttacagcggatcgcgtcggtgtctagctacgtcgcgcgatatgtctcacccccagggtgtcaaagtacgtgacttcttggagccctcaac

SEQ ID NO: 15643 - RNA, 221 nt, unidentified
  source 1..221: mol_type = other RNA; note = Related to SECT01000232.1; note = Oxalobacteraceae bacterium
gttgagggggccagatcgaggctagtgcgtgcccgggagggtacatagacgcttgcacaacaggcttgcgttgggacgcggattgccgttgttctgagaagaagccggcgcttgacaggaggttgcatacgacttccatttacgagcgcttgtctcctagaaagccgcatgcatccgcctgcggcggatatcgaagtagtcctcaatgtggtctcctcaac

SEQ ID NO: 15644 - RNA, 221 nt, Sphingobium sp.
  source 1..221: mol_type = other RNA; note = Related to NGUN01000003.1
gttgaggggaccaccttgaggctagtgcgcgtccatttggacgcatagacacttgctcaacaggcttgtgtcggggcgcggatttcagttgccctaagaataagccggcgcttgacaggaggttgcatgcgaccttctttcacgagcgcttgtctcctagaaggccgcatgcatccgcctgcggcggatatcgaagtagtcctgaatgtggtctcctcaac

SEQ ID NO: 15645 - RNA, 221 nt, Pelagerythrobacter marensis
  source 1..221: mol_type = other RNA; note = Related to QFNB01000026.1
gttgagggggccatcttgaggctagtgcgcgtccgcgaggacgtattaacgcttgctcaactggcttgcgttggggcgcggattaccgttgctctaagaaaaagcttgcgcttgacaggaggttgcatgcgacttccctttacgagcgcacgcctcctagaaagccgcatgcatccgcctgcggcggatatcaaagtagtcctcgatgtggtctcctcaac

SEQ ID NO: 15646 - RNA, 219 nt, Sphingopyxis sp.
  source 1..219: mol_type = other RNA; note = Related to JAEMRT010000003.1
gttgagggggccaccttgaggctagtgcgcgtccgcaagggcgcatagacgctgctcaaacggctgcgttggggctcggaattccgttgctctcagatcaagcccgcgcgtgacaggaggttgcatacgacttcccttcacgagcgcaagtctcctagaaagccgcatgcatccgcctgcggcggacaccgaagtagtcctttatgtggtctcctcaac

SEQ ID NO: 15647 - RNA, 220 nt, Acetobacter sp.
  source 1..220: mol_type = other RNA; note = Related to NZ_JACRVS010000011.1
gttgaggggcccaccgggaggctagtgcgcgtccgcaaggacgcattgacgtatgctcaacggcatgcgttggggcgcggatttccgctgccctcagaacaagtccgcgcttgacaggaggttgcatgcgacctctctaatcgagcgcatgtctccggataggccgcatgcatccgcctgcggcggatatcaaagtagtcctctatgtggtctcctcaac

SEQ ID NO: 15648 - RNA, 225 nt, Sphingomonas sp.
  source 1..225: mol_type = other RNA; note = Related to NZ_SCNH01000027.1
gttgggggggccacatggaggctagtgcgcgccgtctcatttggcggtgcatagacgggtatccagctgtatccgttggggcgcggattaccgttgctcttagaacaagtccacgcttggcaggaggttgcgtacggcttctccgcgagcgtgagccttcgggttcagccgcacgcatccgcctgcggcggagatcaaagtagtcctccatgtggtctcctcaac

SEQ ID NO: 15649 - RNA, 224 nt, Bradyrhizobium sp.
  source 1..224: mol_type = other RNA; note = Related to NZ_CP013949.1
gttgagaggatcggggcatggttagtgcgtgcctgacgcaggtcaggcacctaggcagttgtaagctgtaactgctggggctcggactaccgcagccctgtgagcaagctgacgctaggcagtcgattaaagggaaagcctgtttcccatcgtgcgcctcgcgtcggctctccctttattcacctacggtgaagtcaaagtaactatgtcttggtcttctcaac

SEQ ID NO: 15650 - RNA, 221 nt, Neorhizobium galegae
  source 1..221: mol_type = other RNA; note = Related to CP090554.1
gttgaggagacccgctcatggttagtgcgggccatctgaagaggtggtccatagacggctattactgtagtcgttggggcgcggattaccgctgctctaagaacaagcctaggcttgacaggaggtcgcgaacgcctcttttctccatcgcgcgcctcggggcgagccgtccgcggccgcctgcggcggcatcgaagtagctatggcgtggtcttctcaac

SEQ ID NO: 15651 - RNA, 242 nt, Citrobacter freundii
  source 1..242: mol_type = other RNA; note = Related to DACSWP010000009.1
actgagaaggactacatatgactagtgtcagcaagcaactctccatcttacctattggcttgattgagaattgctacatcattttgatgttggggtagggacttcctgagccttatgaaatagccctcgcttggctggagacggcgcactctgccttttccagcgtaagccttgggtcaccagagcgcgccgtcgcctgcggcgacatacgcatcggagtagttgtatgtggtcctctcata

SEQ ID NO: 15652 - RNA, 244 nt, Serratia proteamaculans
  source 1..244: mol_type = other RNA; note = Related to CP068391.1
actgagagcgactacgtatgactagtgctaacgagcaatacaaagtcacccccttggggatgatagagggttgctacaccactttacagtgggtgttggggtatggatttcctgaacctcacgaaaaagcccacgcttggctggagacggcgcactctgcctccgccagcgtaagtcttgggttaccagagcgcgccgtcgcctgcggcgacgcatcggagtagttatatgtggtcctctcaat

SEQ ID NO: 15653 - RNA, 244 nt, Aeromonas veronii
  source 1..244: mol_type = other RNA; note = Related to NKWH01000001.1
actgagagagaccacatatgactagtgttaacgagcaacacaaagcctttccaatcggatcggtggaggtttgctacaccactttacagtggatgttggggtacggatttcctgagcctcatgaaaaagccctcgcttggctggagacggcgcactctgcctctaccagcgtgagccttgggtcaccagagcgcgccgtcgcctgcggcgacgcatcggagtagttttatgtggtcctctcaaa

SEQ ID NO: 15654 - RNA, 243 nt, Celeribacter ethanolicus
  source 1..243: mol_type = other RNA; note = Related to CP022196.1
gttgagagcggtcacctatgactagtgctagcgagcgattcaaattcgcaccctcgggggcgaaggaggatcgctacaccactgtaaggtggatgttggggtacggattccggggcctcacggaaaagcccacgcatggctggagacggcgcactctgcctcatccagcgtatgcctcgggtcaccagagcgcgccgtcgcctgcggcgacgcatcggagtagttttatgtggtcctctcaat

SEQ ID NO: 15655 - RNA, 244 nt, Salipiger thiooxidans
  source 1..244: mol_type = other RNA; note = Related to JAIUZF010000015.1
gttgagagagaccacctatgactagtgctagcgagcaatgcaaagtcgcaccttcgggggcgagggaggattgctacaccactgtaaggtggatgttggggtacggagttccggagcctcacgacaaagcccacgcatggctggagacggcgcactctgcctcttccatcgtatgcctcgggtcaccagagcgcgccgccgcctgcggcgacgcatcggagtagttttatgtggtcctctcaat

SEQ ID NO: 15656 - RNA, 248 nt, Mameliella alba
  source 1..248: mol_type = other RNA; note = Related to JAHVJB010000004.1
cctgagagcgactgctatttgactagtgttagccggcagcaggaaacccgtccttacggtgggtagattgctgacatgctcatcctcacggttgagctttgggatagggattgcccgattctcacggccaagcctacgcatgattggagacggcacactctgcctcttccttcggctgtctctgggtcgccagagtgtgccgtcgcctgcggcgacgcatcggagtagttaaatgtggtcctctcaca

SEQ ID NO: 15657 - RNA, 222 nt, unidentified
  source 1..222: mol_type = other RNA; note = Related to VIRH01000027.1; note = Rhodobacterales bacterium
gttgagaggagccgcaattgattagtgttcgcaagcagttagtgtctattagctgcggcaactgcggttgttggggtaaggagttcctgatcctcatggaaaaactcatgcattactggaggcggagcacttcgacatttgtccggtgcgtgtgccttcggtgtcgaagcgctccgccgcctgcggcggcgtgacggagtaattgaatgtggctccctcaaa

SEQ ID NO: 15658 - RNA, 221 nt, Rhizobium laguerreae
  source 1..221: mol_type = other RNA; note = Related to JAAXTE010000009.1
actgagaccgaccacatgttgattagtgttagcaagcaacgtcagttgtttacggttgccgcaaggcaaccgtcggggcaaggatttcctgtacctcgtgagaaagctcaggctgggctggagacgaagcactctgcaagtctcctacgtatgccttgggcagcagagcgcttcgtcgcctgcggcgacgcatcggagtaacagcatgtggtcgtctcacc

SEQ ID NO: 15659 - RNA, 221 nt, Rhizobium sp.
  source 1..221: mol_type = other RNA; note = Related to AHZC01000134.1
gttgagaccgaccacatgttgattagtgttagcaagcaacgtcagttgcttacggttgccgcaaggcaaccgtcggggcaaggatttcctgcacctcgtgataaagctcaggcttggctggagacgaagcactctgcaagtctcctgcgtgtgccttgggcagcagagcgcttcgtcgcctgcggcgacgcatcggagtaacagcatgtggtcgtctcacc

SEQ ID NO: 15660 - RNA, 221 nt, Rhizobium leguminosarum
  source 1..221: mol_type = other RNA; note = Related to WIDU01000012.1
gctgagacagatcacatgctgattagtgttagcaagcaacgtcagttgcttaccgccgtcttagggcggcggttggggcaaggatttcctgcacctcgtgagaaagctcaggcttggctggagacgaagcactctgcaagactccagcgtatgccttgggcagcagagcgcttcgtcgcccgcggcgacgcatcggagtaacagtatgtggtcgtctcacc

SEQ ID NO: 15661 - RNA, 231 nt, unidentified
  source 1..231: mol_type = other RNA; note = Related to PAYC01000024.1; note = Idiomarinaceae bacterium
tctgaggaagaccatataatgattagtgtagcgagcaggatatactctgtgtattctgctaccacagaagtaaatcattgtggtgggaggcgggagttcccgtcctctttggaaaagcccttgctgagcgagagcacagtcactctggcaatgttccctcgctggctcgggttgccagagcgactgtacgctctggtttaatcggagtaattgttatgtggtctcctcttt

SEQ ID NO: 15662 - RNA, 226 nt, Marinomonas sp.
  source 1..226: mol_type = other RNA; note = Related to JXYC01000005.1
attgagagaggctgcatatgattagtgatagcaagcaacttactctaagttgctgtagttactttagtggtgactactggggtatggatttcctgatcctcatggaaaagcttacgcttggctggagggtgaatactctgccgtatacccacgtaagcctaaggccgccagagcactcatccgcctgcggcggtgtttcggagtaattatatgtggtctcctcaac

SEQ ID NO: 15663 - RNA, 223 nt, unidentified
  source 1..223: mol_type = other RNA; note = Related to JAAOIO010000006.1; note = Endozoicomonadaceae bacterium
attgagagaggctacatatgattagtgttaacacgcaactgaaaggttgcgatagttatttaataagtaactgttggggtaaggatttcctgaacctcatggaaaagcctacgcttgactggaaatggagtactctgcttccgccgcgtatgcctaaggtcagcagagcactccatcgcctgcggcgatgtatcagagtaatcgtatatgtggtctcctcaat

SEQ ID NO: 15664 - RNA, 223 nt, Vibrio parahaemolyticus
  source 1..223: mol_type = other RNA; note = Related to CP006008.1
actgagagagaccactaatgattagtgtttacaagcaactaacaagttgcggtacttttactatgtatgagtactggggtaaggatttcctgaacctcaaggaaaagcggacgcttgactggagacggagcactctgccttctgcccgcgtacgccttaggtcgccagagcgctccgtcgcctgcggcgacgatttggagtaatcgtatgtggtctcctcata

SEQ ID NO: 15665 - RNA, 221 nt, unidentified
  source 1..221: mol_type = other RNA; note = Related to PUHN01000047.1; note = Rhodobacteraceae bacterium WD3A24
gttgaggagggccgcacgtggctagtgtcagcaggcaactttgttgccgcagacgccactatggcggctgtcggggcgtggagtaccatggccctgtggaaaagcctacgcgagactggagattgcgcacgctgcctccttccgtcgtgggcctcgggtcgccagcgcgcgcagtcgccgtgccggcgccatcggagtagtccacgtgtggtcccctcatc

SEQ ID NO: 15666 - RNA, 203 nt, Ralstonia solanacearum
  source 1..203: mol_type = other RNA; note = Related to NZ_CDRJ01000001.1
gctgagaagtaccgtctatagttagtgcaccaccgaaaccttcggggttcggtggcagtagagcccggattgccgcggtctcattggaatagcttgcgctgtaagggaagttcgaacaacttctccaagcatcgcaagcctcaggtcgaagtcgttcgaattacgccttaggggcgtcaaagtagctatgtggtcttctcagc

SEQ ID NO: 15667 - RNA, 199 nt, Ralstonia solanacearum
  source 1..199: mol_type = other RNA; note = Related to NC_017559.1
gttgagaggcgtcactgacggttagtgtatcgccgaactgagttcggtgacttttagggtacggattgccgtttcccgcaggaagagctcatgcatgacaggaggcgagaagcgacttctctgccatcgcatgtctcgggtcgaagtcgcttctccccgcccgcttgggcgtcaaagtagcttatgtgggcctctcaac

SEQ ID NO: 15668 - RNA, 235 nt, unidentified
  source 1..235: mol_type = other RNA; note = Related to JADFZH010000217.1; note = Magnetococcales bacterium
gtgaaggggaacttcgggaacttggcaaaactgatcggagtaatggccggtcggtacccatggagacgcagtgatgtggttccatgaacggggagcggagtccgcagtcctggagacagcttatttgggtttgagtatgggtggtcgaccgtctttcgtttcgagcctcactgactggccgaccacccaccctgcgcagcggggttaaagcaagacaatggagtttccccttcac

SEQ ID NO: 15669 - RNA, 242 nt, unidentified
  source 1..242: mol_type = other RNA; note = Related to JADGBU010000012.1; note = Magnetococcales bacterium
gtgaagggaggcttcgttgaacttggcaaaaccgaccggggtcatggccggacggtaccatccagggataagcagcaatgcggatccctggtcggggctcggagtccgatgtcctggaaattgctttcttgagcttgagttggctgatcgaccaccctacgctttgcggcgtactcgcggtttggccgatcagccatcccgcgtagcgggttgaagcaagagatatggagttctcccttcac

SEQ ID NO: 15670 - RNA, 234 nt, Burkholderia pseudomallei
  source 1..234: mol_type = other RNA; note = Related to KN323041.1
tgtgaaggggtgcttcgttgacttggcaaaactgaccggaggtaatggccagtcagtacccatgtcgtctcttcgagacgcatgaacggggctcggagtccgcagtcctggatacagcattcttgagcgcgagatgggtggacgaccagcttgagcttcgcggtctcgcgatcaggccgtccagccaccacgcagagcgggttaaagcaagaaatatgaagttctcccttcacg

SEQ ID NO: 15671 - RNA, 229 nt, Serratia marcescens
  source 1..229: mol_type = other RNA; note = Related to NZ_CP050013.1
tgtgaagggaagattcgttaacttggtatcgctggctgcggccagtacccatggagtcactataatgtggaatcatgaacggggcgcggagtccgtcgtcctggaaatagctttcttaaaagcgagatgggaaatcgaccaacttgggttttgcttgtgtctcacgggtcgttcgatttcccaccccgcgatgcggggttgaagcaaggtatgaacttttcccttcact

SEQ ID NO: 15672 - RNA, 232 nt, unidentified
  source 1..232: mol_type = other RNA; note = Related to JAFKLC010000111.1; note = Rhodospirillales bacterium
gtggaggggagatttttgagcctggcaagactgtctgggtaaaatcaggcagtacctgatggggtgccatttggcatctctgcagacggggcgcggagtccgctgtcctggagaaagctactttgtgcgcgagatgggcgatcaagctgcctacgctttgctggtttctcgctaccagctcgatcgaccaccccgcagacggggttaaagcaggatgaacttccccctccac

SEQ ID NO: 15673 - RNA, 234 nt, unidentified
  source 1..234: mol_type = other RNA; note = Related to RFVU01000153.1; note = Betaproteobacteria bacterium
atgggggaacttcacgcgacttggcaaaaccggtcgaggtcatgggcgaccggtacccttgcggctgcgttgcagcggtcgcatgaacggggcgcggagtccgctgccctggaatgtgctgtctcgagcatgagatggtccatcgactgccgcaggcagcgccttgtgcgcagcaccccggtcgatggcccgccccgcccgcggggctgaagcaagccgatggagttcccccgc

SEQ ID NO: 15674 - RNA, 264 nt, Acinetobacter tjernbergiae
  source 1..264: mol_type = other RNA; note = Related to NZ_KB894370.1
aatgtgatggacattttcgatttctggtagactgttgataaaatacttgattagtagttatcaactgtacagctataacttgattgtagtagttgttcggagctcagagtctgaagctctatgaaatagcttaattttaggcgatgattagccatttccgtattcgctcgttctgctctgctttctggcggcgcagcttcactctacgtaaacggctaaacccgccaaggcgggttaaagcagaggtcaaaatgtccacacaca

SEQ ID NO: 15675 - RNA, 267 nt, Acinetobacter baumannii
  source 1..267: mol_type = other RNA; note = Related to NZ_NIWI01000032.1
aatgtgatggacattttcggtttctggtagactgttgatacctgttttataagtaggtatcgattgtacaacaaccacaatttgtttgtagttgtatgttgggagctcagagtctgaagctctttgaaatagcttaattttaggcgatgattagccattgtcgtattcgctcgttctgctctgcctgattgcggcgcagcatcactctacgtcaacggctaaacccgccatgcgggttaaagcagaggttgaaaatgtccacacata

SEQ ID NO: 15676 - RNA, 257 nt, Acinetobacter baumannii
  source 1..257: mol_type = other RNA; note = Related to KB849902.1
tgtgatggacatccacaatttctggtagacgattgttcttaatatttaggagcagttgtacaggtactatttacttagtatctaacgggactcagagtctgacgtcctttgaaatagctatatttttggcgaagattagctattgattcttttcgctcgtactgtagtcgcctctgggggctcacagcttcgcgaaccatcaatagctaaacccgccgtcgcgggttaaagcagaggatttggtatgtccaatcaca

SEQ ID NO: 15677 - RNA, 236 nt, Burkholderia cenocepacia
  source 1..236: mol_type = other RNA; note = Related to NZ_CP034547.1
gtggaggggtggccaagcatcagtcaaacgtggctacctaacttggtagttgcggccttgttgcgctgataggccaacaatgcggcatcgggagtcccggtgcctcggaagtagctttctcttgatcgaggttaacacgcggttcagagcttcgaaacagcgcctatacctctgaaccgtgtgttgaccccgctccgcggggcgggattaaagtgatgcttggcccttctctccac

SEQ ID NO: 15678 - RNA, 236 nt, Cupriavidus basilensis
  source 1..236: mol_type = other RNA; note = Related to NZ_BBQM01000001.1
gtggaggggtgaccaagcatcagtcaaacgtggctacctaatttggtagttgcgaccttgttgcgctggaaggccaacaatgcggcatcgggagtcctgatgccttggaagtagctctctcttgatcgaggttaacacgcggttcagagcttcgaaacagcgcctatacctctgagccgtgtgttgaccccgcttcgcggggcgggattaaagtgatgcttggcccttctctccac

SEQ ID NO: 15679 - RNA, 189 nt, Turneriella parva
  source 1..189: mol_type = other RNA; note = Related to NC_018020.1
gatggggttcagaggacttctggcaagaactcttagagtcaatttggaagtggatttccacaaccgctgaagtagcttatgattacatcaagcaccagtgtcccttttctcgcacggagccttacggaaaagcgacactggtcctcgctggcgcgaggttgaagcagatgttactctggaccccacatc

SEQ ID NO: 15680 - RNA, 271 nt, Mixta intestinalis
  source 1..271: mol_type = other RNA; note = Related to NZ_CP028271.1
tttggggttccgtcgtgaaacttagttgtggtagatacatatatagtgtatcaactgccattggcagcctacgattccgtttgaatggtttgataggatgccaacgagcacggattccgtcgctctttgtagtagccttcgccagagtgagtagtgatgtgcacgtttgcgcgcgttcttttgctctgggggcaacgaagcctgtgcgcaaacgcgcgcatcacgacctcacttacgtgaggtgaagtaagtgactcaatggaaccccaac

SEQ ID NO: 15681 - RNA, 257 nt, Pectobacterium carotovorum
  source 1..257: mol_type = other RNA; note = Related to NZ_JUJG01000015.1
tttggggttccatcgtgaaacttagttgtagtggatgcactaatagtgtatcaactgccttcggcagcttaatcgatctgataggatgtcgacgagcacggattccgtcgctctttgtggaagctttcgccagagtgagtagtgatgtgcgcgtttgcgcgcgttcttatgcttctggcaacgaagcctgtgcgcaaacgcgcacatcacgacctcacttgcgtgaggtgaagtaagtgactcaatggaaccccaat

SEQ ID NO: 15682 - RNA, 270 nt, Pantoea agglomerans
  source 1..270: mol_type = other RNA; note = Related to NZ_CP091099.1
tttggggttccgccgtgaaacttagctgtagtgggtacatttttaatgtaccaacttccaatgactatcctaaaaaccgtttttacggtatgactggacgtctacgagcccggattccgtcgctcgctgtaaaagctttcgccagagtgagtaatgatgcgcacttttgcgctcgttcttttgctttggggcaacgaagcctgtgcgcaaaagtgcacatcacgacctcacttgcgtgaggtaaagtaagtgacacagtggaaccccaat

SEQ ID NO: 15683 - RNA, 250 nt, Cronobacter sp.
  source 1..250: mol_type = other RNA; note = Related to JAANQB010000011.1
tttggggttccgtcgtgaaacttagtcgtagtaggccattttttaataggtcgacttccattgacattctgaaagattgtctacgagcacggattccggagctctttgtaattgccctcgcaggagtgagtaatgatacgcgtttttgcgcgcgttcttatgcctttgagggcaacgagactgtgcgcaaaaacgcgcatcacgacctcactaacgtgaggtgaagtaagtgacgcaatggaaccccaat

SEQ ID NO: 15684 - RNA, 273 nt, Massilia sp.
  source 1..273: mol_type = other RNA; note = Related to PPXQ01000003.1
ttcggggttccgtcgtgaagcttagtcgtagctgatacgcactggccgtatcagcttccgttgatgactcttagattcggtgcatcggtctatggggttgtcattgagcacggacttccgtcgctcattgtaggtgccgccgcttgagtgagtactaatgtgcgctttcgcgctcgttctcctgctcctccgggcgtcgaagcctttgcgcaaaagcgcacatcagaacctcacttgcgtgaggtgaagtaagttatgcaatggaaccccaat

SEQ ID NO: 15685 - RNA, 271 nt, Zoogloea sp.
  source 1..271: mol_type = other RNA; note = Related to JADJBR010000009.1
tctggggttccagcgtgaagcttagtcgtagtggatgggcgaattgctcgtcgacttccgttgattacttgtggattcgtgaagacggtcttccaggttttcatagagcacggattccgtcgctcgttgtaggagccgtcgctagagtgggttgggtcgtgcgcttttgcgctcgttctctgctccttcgggcggcgaagcctgtgcgcaaaagcgcacgacccgacctcactaacgtgaggtgaagtaagtgacgcattggaaccccaac

SEQ ID NO: 15686 - RNA, 273 nt, Achromobacter deleyi
  source 1..273: mol_type = other RNA; note = Related to CADILF010000059.1
tttggggttccaacgcaatgcttagtcgaagcggtgccatttaaaggcatctttttcgttgattacttgagttcgtgctatatgagcggctcgtcaggtgttcaaggagtgcggattccgctactcgtcgtaagagtcgtcgctagagtgagttgtagcgtgcgctttcgcgctcgttctctgctccttcgggcggcgaagcctgtgcgcgaaagcgcacgctactacctcacttgcgtgaggtaaagtaagctatgcgttggaacccccatt

SEQ ID NO: 15687 - RNA, 271 nt, unidentified
  source 1..271: mol_type = other RNA; note = Related to JAEUMY010000005.1; note = Betaproteobacteria bacterium
cttggggtttcagcgtgaagcttagccgtagtggatgcgcgcttgtcgcatcgacttccgtcggaggctggttgattcgcgtagacggtctatctggctttcgtagagcacggattccgtcgctcgttgtaggtgccgtcgctagagtgggttctgaactgcgcctttgcgcgcgttctctgctcctccgggcggcgaagcctctgcgcaaatgcgcagttcaggacctcactagcgtgaggtaaagtaagtgacgcgctggaaccccaat

SEQ ID NO: 15688 - RNA, 240 nt, Desulfotignum balticum
  source 1..240: mol_type = other RNA; note = Related to NZ_ATWO01000001.1
tatggggttccagcgtggaaattagctgtaattggttcgaagccaataccaatactgaccagatgattcgttatctggtttatggtagagcacggattccggcgctcattgtgaaagccaccgcttggagtagaccatacataggccattctgacacgcgtaaagagcgccttcatgccagaatgccctatgtatcctcactacgtgaggtttaagtaaatgacacgctggaaccccaac

SEQ ID NO: 15689 - RNA, 254 nt, Shewanella algae
  source 1..254: mol_type = other RNA; note = Related to CP033575.1
tttggggttccaacgtgaagtttagccgtcggtggtgtaatgccatcaccagcacgctttggaggggtgaaccctttgaaacgtgtagagcgcggaatccgttgctcattgtggtagccctcgctggagtgaactatgcctcgcgttttaaagcgcgtggtctccgcttgaggctacacccagcctttgctttaaaacgcgaggcataccctcacttacgtgaggtaaagtaaatgaatcgttggaatcccaat

SEQ ID NO: 15690 - RNA, 232 nt, Snodgrassella alvi
  source 1..232: mol_type = other RNA; note = Related to NAHO01000032.1
ttttaggattccagcgtgaaatttagtattgtctatagctaatataatattagttatggatcacagcttattaacttaagttgttatgagtgcggattccgctactctatgtaatagccgatgatgaatgagaactacatgatgttatttaatccttgtaagtcttcacattaaataacatcatgtacctcactacgtgagttaaagtaaatgaaacgctggaatccttatt

SEQ ID NO: 15691 - RNA, 195 nt, Psychromonas antarctica
  source 1..195: mol_type = other RNA; note = Related to NZ_JAHNZV010000197.1
acttagggtttcatcgtgaaatttagtgttagctggtctaacttcagcagagagtggattccacttctcaatggaaatgtctactattgcgcaagggtaatgcaaaagctttgttcatgcgtaggcttcattccaaatcttttgcatcaccctcacttcgtgaggttaagtagatgaatcgatggaaccctaata

SEQ ID NO: 15692 - RNA, 195 nt, Colwellia piezophila
  source 1..195: mol_type = other RNA; note = Related to NZ_KB905170.1
acttagggtttcatcgtgaaatttagtgttagctggtctgacttcagcagagagtggattccacttctcaatggaaatgtctactattgcgtaagggtaatacaaaaactttgttcatgcgtagccttcattccaaaccttttgcatcaccctcacttcgtgaggttaagtagatgaatcgatggaaccctaata

SEQ ID NO: 15693 - RNA, 193 nt, Vibrio anguillarum
  source 1..193: mol_type = other RNA; note = Related to CP010032.1
cttggggttctgtcgtgaaatttagcgttagctggtctaacttcagcagagtgtggattccactactcaatggaaatgtctactatagcgaaaggatgaagcaaaagctttgttcacgcgtgggcttcattccaaaccttttgcttcaccctcacttcgtgaggttaagtaaatgaatcgatggaaccccaat

SEQ ID NO: 15694 - RNA, 193 nt, Enterobacter sp.
  source 1..193: mol_type = other RNA; note = Related to VWWR01000002.1
cttggggatccttcgtgaaatttagtgttagcctgactaacttcagcagagtatggattccattactcgatgggaatgttaactattgcgaacggatgaagcaaaagctttgttcacgcgtagccttcgttccaaagcttttgcttcaccctcacttcgtgaggttaagtaaatgaatcgttggatccccaat

SEQ ID NO: 15695 - RNA, 203 nt, Geobacter sulfurreducens
  source 1..203: mol_type = other RNA; note = Related to NZ_CP078092.1
taaggggctccagagaaaatctagtgaaggcccaacctgagtgttgggtacgagtaggcagcggattccgcgagccattggaatagcacatgaatgaacaaggatattaatggcaaacgcttacgttcgtatgccttactacgttcgccattaatgtcctcgcttcgcgaggttgaagtagatgagtatctggagcccgcttt

SEQ ID NO: 15696 - RNA, 257 nt, unidentified
  source 1..257: mol_type = other RNA; note = Related to PSRA01000192.1; note = Bacteroidetes bacterium
ggtgtgttgatcggaggactatttagccgtctgaaaccagcgggacgactgctggaatcagacagattccacggatggttcgccattcatggatggggaagtcggacagacttctctggaaagaactgacgcgaagacggctttgccgtccttgagcgtcacgccccaattaccttcggtgtctcgggagggccgcgacgctcatggtcccttcgggccctagaaggcgaggtaaatggaaacctggtcaacacacc

SEQ ID NO: 15697 - RNA, 260 nt, Aureliella helgolandensis
  source 1..260: mol_type = other RNA; note = Related to NZ_CP036298.1
ggtgtgctggccgggtgaccgttcagccgtctgagcaagttggcgctgccgatttgcttcagacagattccgatgacggctcgcctgattcggatggggaagtcggaaaggcttctctggaaagaactgacgccaagacggctgcgccgtccgtgagtgtcgcgccccttgatccttcggccagagtgtcttcggcggagcccgacactcatggccacaagggctaaaggtgacgtgaatggaaacttggtcagcacacc

SEQ ID NO: 15698 - RNA, 246 nt, unidentified
  source 1..246: mol_type = other RNA; note = Related to JAAXWO010000007.1; note = Chlorobiaceae bacterium
ggtgtgcaggccgggcaatcgttcagccgtctggctctggtaacggggttcagacagaatccaatggcagttcgctgtttgaggatggggatatcggacagatatctctggaaaaaactgacgcaaaggcggctttgccgccctcaagcgtctccatctcgccaccttcgtctgctcgtgcggacggagacgcttcaggcaccatcggcttgaaggagaagtgaatggatgcctggtcagtacatc

SEQ ID NO: 15699 - RNA, 258 nt, Pirellula sp.
  source 1..258: mol_type = other RNA; note = Related to PNKZ01000003.1
ggtgtgctgatcaggagaccgtttagccgtctggcgtgatcgtaaaacgacgcgttcagacagaatcgccggcggactgtctgccggcgatggggaagtcggacagacttctctggaaagaactgtcgctaggatggcttcgccatccataagcggcacggtccttttccctttggcccgagtgtctgtggtcggcccgcgccgctcacggccccagggggcttacggagacgtaaatggaaacttggtcagcacacc

SEQ ID NO: 15700 - RNA, 248 nt, Burkholderia cepacia
  source 1..248: mol_type = other RNA; note = Related to CP045236.1
ggagtgccggctagtcagacgctcagccgttttcattctctgccagttgtgacagaaaatgaaaacagaatccaccgatggtgggtggatgggaaggccagaccggtctttctgggaagatctgacgcaatggcggctacgccgccctactctatcgagctccacatcctgcggcgactcgtaaggacctcgatagtgtaagacccaagggtcgaaggagaggtgagtggaagactggtcggcacacc

SEQ ID NO: 15701 - RNA, 255 nt, unidentified
  source 1..255: mol_type = other RNA; note = Related to JAGRPC010000052.1; note = Verrucomicrobiae bacterium
ggtgtgttggccgggggaccgttcagccgtctggtccgattgaggcaactcgtcgggtgcaggcagaatccgaggccagcgtgctggctgaggatggggatgctggacaagcgtctctggaaaaaactgacgcgaggtcggctgcgccgcccttgagcgtcgtcacccagcaaccttcggggcctcgtgtgggcgacgatgctcatggcccgaagggcgaaagggataagtgaatggaaacctggtcaacacatc

SEQ ID NO: 15702 - RNA, 261 nt, Novipirellula galeiformis
  source 1..261: mol_type = other RNA; note = Related to NZ_SJPT01000002.1
ggtgtgctggccgggagaccgttcagccgactggcttggatcgcgaaagcgggcaagttcagtcagaatcggaaactggcttgccagtggaagatggggaatccggaatgggttctctggaaagaactgacgcaaagacggctccgccgtccttgtctgtcatgacgcaagttccttcgacgttgcctcctcgggagcgccatgacagacatggccctttcggctcaagtgagacgtgaatggaaacttggtcagcacacc

SEQ ID NO: 15703 - RNA, 254 nt, unidentified
  source 1..254: mol_type = other RNA; note = Related to SHMQ01000020.1; note = Candidatus Acidulodesulfobacterium acidiphilum
ggtgtgctgaccagtcttccattcagccgtttgcctaaaaaacaaacagattcagcatctcgcagtcaaaatgcgtggaggctgatggggaaatcagttcggtttctctggaaagaactgacgcaaggacggctttgccgtccatgtttgtcaaatctcaaataccttcggggtctcggaagagatttgacaatcatggtcccttggaccatgattatataaggagaagtgagtggaagactggtcaacacacc

SEQ ID NO: 15704 - RNA, 255 nt, unidentified
  source 1..255: mol_type = other RNA; note = Related to DNVK01000297.1; note = Lachnospiraceae bacterium
ggtgtgttggccaggggactgttcagccgtctggcctgatggagttaccatgaggaacagacagaatccacgaatgctttgcgtgacgtggatgggaaggccggacaggcttttctggaaagaactgatgcaaggacggcttcgccgtccatcaatgtcatgccacagaatccattcggtgtctcggaaatggcatgacattcatggcccttacgggctgagaggtgatgtgaatggaagcctggtcaacacacc

SEQ ID NO: 15705 - RNA, 262 nt, Leucothrix arctica
  source 1..262: mol_type = other RNA; note = Related to NZ_QGKL01000023.1
ggtgcgctgactagttgatgttcagccatgtacaatgctctgtagtggttttatacgagtggtgtatatatattctgattagatgttatatctgtgatgatgggagagtcggatagattcttctggaaaaaactgatgttaaggtggctttgccacccgtgtgtgtcacacaaaaccgactagatcgtcttcggggtgtggtgcaacactcatggacccaagggttcaaaggagaggtgaatggagacttggtcagcacatc

SEQ ID NO: 15706 - RNA, 258 nt, Burkholderia sp.
  source 1..258: mol_type = other RNA; note = Related to CABVQD010000004.1
ggtgtgctggccgggcgaccgttcagccgttgaccgatgatgaaggcagtgcctttcaggagtcgacaaattctgtcgtagcttctacatcgacagatggagatgtcggacaggcatctctggaaagatctgacgctaaggcggctgcgccgcccttcagtgtcatgccccaatcaccttcgatgtctcgggagagccatgacactgatggccccgtgggctcaaaggagaggtgaatggagacctggtcagtacacc

SEQ ID NO: 15707 - RNA, 255 nt, unidentified
  source 1..255: mol_type = other RNA; note = Related to SSEJ01000200.1; note = Gammaproteobacteria bacterium
ggtgtgctggccgggcaaccgttcagccgccaatccggaaggagcttgcttctcttgggttggcagattctgtagaggttttggcttttacggatggggatgtcggacagacatctctggaaagatctgacgctaaggcggctacgccgcccttcagtgtcatgcttcaatcacctgcggtgtctcgggagaaccatgacactgatggccccttgggctcaaaggataggtgaatggaagcctggtcagtacatc

SEQ ID NO: 15708 - RNA, 264 nt, Pseudomonas sp.
  source 1..264: mol_type = other RNA; note = Related to CVTP01000021.1
ggcgtactggccagtcgcccacttagccgcccaagcgtagtaaagtgctaagcgcaattactacgtgacaggctgattctgcctgagcctgactttggtagatggggatatcggatagatgtctctggtaagatcttacgctaagggcggcttcgccgcccttcatggccatgcaacaagatttcagcgatgacttggaagtcgcatggccgtgatggcccctagggtcaaaggagaggtaagtggaagactggtcagtacatc

SEQ ID NO: 15709 - RNA, 255 nt, Verminephrobacter eiseniae
  source 1..255: mol_type = other RNA; note = Related to NC_008786.1
ggtgtgctggccgggtaaccgttcagccgctgactgatggagactcagtctctcaaaggttggcagattccgtcgcagcctcggcttcggcggatggggatgtcggacagacatctctggaaggaactgacgccaaggcggctacgccgcccttcggtgtcacgtcccatgcaccttcggcgtctcgggagagacgcgacaccgatggccccttgggctcaaaggagaggtgaatggaagcctggtcagtacacc

SEQ ID NO: 15710 - RNA, 255 nt, Pseudomonas aeruginosa
  source 1..255: mol_type = other RNA; note = Related to DAFPEA010000002.1
ggtgtgctggccgggtaaccgttcagccgccgaccgatggagaccctgtctctgtgaggtcggcagattctgttgaagtctcggcttctgcggatggggatgtcggacagatatctctggaaggaactgacgccaaggcggctacgccgcccttcggtgtcacgtcccaatcaccttcgttgtctcgggagagacgcgacaccgatggccccttgggctcaaaggagaggtgaatggaggcctggtcagtacacc

SEQ ID NO: 15711 - RNA, 246 nt, Shewanella algae
  source 1..246: mol_type = other RNA; note = Related to JADZHH010000033.1
ggtgtgctggccaagttaacattcagccgttgacaggtgactctcacctgtcgactgattctgtagaagcctttacttttacggatggggatgtcggagaggcatctctggaaagatctgacgctaaggcggctgagccgccctttagtatcatgcctcaatcaccttcggtgtctcgtaagagccatgatactaatggccccctgggctcaaaggagaggtgaatggaaacttggtcagtacacc

SEQ ID NO: 15712 - RNA, 257 nt, Cronobacter condimenti
  source 1..257: mol_type = other RNA; note = Related to NZ_CP012264.1
ggtgtgctgatcagcactccgttcagccgttaaacaatgatgagtgaaattcaccgcttgtttgacagaatctgttgtggcttttgttacaacggatggggatgttggagaaacatctctggaaagatctgacgcaaaggcggctacgccgcccttcaatgtcatacattaacggccatcgaggactcggaaaatgtatgacactgatggccccctgggctcaaaggataggtgaatggaaatctggtcagcacacc

SEQ ID NO: 15713 - RNA, 258 nt, Providencia heimbachae
  source 1..258: mol_type = other RNA; note = Related to JAAQVQ010000001.1
ggtgtgctgatcggtattctattcagccgttaaacaagaatgagtgatttatcaccacttgtttgacagattctgttgtagcttctgttacaatagatggggatgttggagaaacgtctctggcaagatctaacgctaaggcggctacgccgcccttcaatgtcataccttatgggccttcgaagactcggaaaatgtacgacactgatggccccctgggctcaaaggataggtgaatggaaatctggtcagtacacc

SEQ ID NO: 15714 - RNA, 256 nt, Salmonella enterica
  source 1..256: mol_type = other RNA; note = Related to AAMXLY010000014.1
ggtgtgttgactagtgttctattcagccgccaatcatgagctgatgaggtaatcacggtctggttggctgattctgtagcacatgttgttatggatggggatgtcggagagacatctctggaaagatctgacgctaaggcggctacgccgcccttcaatgtcatacattaacggccttcggggactcggaatatgtatgacactgatggccccttgggttcaaaggataggtgaatggaaacctggtcaacacacc

SEQ ID NO: 15715 - RNA, 231 nt, Pseudomonas fluorescens
  source 1..231: mol_type = other RNA; note = Related to JAGGOG010000019.1
ggtgcgctgactaggaactttttagccgccctcatgcgagggtgaattgagatagccttggctagatcgatggggataccggataggcatctctggaatagtctgacgtttggggcggccagccgccccaccgatgccgtgaactctgaccgtcgaggtctcggaaatccacggcattggtggccccctgggcctaaaggagagggtaaatggtttcctggtcagcgcatc

SEQ ID NO: 15716 - RNA, 262 nt, Pasteurella canis
  source 1..262: mol_type = other RNA; note = Related to BQFX01000025.1
ggtgtgctgactcaaaatccatttagtcttcaatattagtggcttataaccattggtactgagaaatctaatgaaacctaatgtttcataggtggggatgtcggatagatatctctgaaaatatgtcacgtaatggcagtcaaactgcccttcaatatcaatcacagctattccatacgaagccttgggatgtgattgatattgatggttccctatcaggaacctcaaaggaaaaagtaaatggaaacttggtcagcacacc

SEQ ID NO: 15717 - RNA, 273 nt, Haemophilus influenzae
  source 1..273: mol_type = other RNA; note = Related to NZ_UEWY01000045.1
ggtgtgctggctaaaatactatttagccatcaatcaatattatgagtctctatatctctaatattgaggttgaggaatctacgaaacttttagtttcataggtgggggtgttggatagacatctctggataaatctaatgtaaaggcagttagactgcccttcaatatcaatcctaactatttcctacgaagacttgggattaggattgatattgatggttcccccttggggaaccccaaaggtaaagtaaatggaaacttggtctgcacacc

SEQ ID NO: 15718 - RNA, 259 nt, Haemophilus parainfluenzae
  source 1..259: mol_type = other RNA; note = Related to QEPO01000001.1
ggtgtgtggattaaaaaacatttagccatcaatattgttgatagtattgatgaatctgcgaaacttttagtttcataggtggggatattggataaatatctctggataaatcttatgttatggcagttagactgcccttcagcatcaatcctagcttttcctacgatgtctcgggataggattgatgttgatggttccccccctcgaacgggagggagaacccaaaaggaaaagtaaatggaaattttttctgcacacc

SEQ ID NO: 15719 - RNA, 249 nt, Snodgrassella alvi
  source 1..249: mol_type = other RNA; note = Related to NZ_CAJZCI010000001.1
ggtgtgctgagcaataaactgttcagccgttgatatcacagatatcaacagaatctattgaagctttaagtaatatagatggggataccggataggcatctctggaaagatctgacgttagggcagttctgctgccctttactatcaagtcccaatgttttccttccgcagccttggatggaacttgatagtaatggttccctaaaggaactcaaaagggaaagtgaatggaaaattggtcagcacatc

SEQ ID NO: 15720 - RNA, 242 nt, Fusobacterium sp.
  source 1..242: mol_type = other RNA; note = Related to FR900422.1
ggtgtattaatcaagcttctgctcagccgttcgctaataatacgcgaacagattcagataatattaattataatttatctgatgggggattcggattgaattctctggaaagaactgacgaaataacggcaaagccgtcctctatcattgaacctatctatccatcggggtctcgggtgcgcttcaatgataaaggtcatgaagactaaaggagtagtgagtggaagcttggtcaatacatc

SEQ ID NO: 15721 - RNA, 238 nt, Ramlibacter henchirensis
  source 1..238: mol_type = other RNA; note = Related to NZ_SMLM01000002.1
ggtgtgccccttgaatccgcttagccgctcgcgccgtaaaggcgtgggcagaattcctgagcgcttgtcgtttgggaatggggaagccgggtaggcttctctgggaagatctgacgcaaaggcggcttcgccgcccaatatcgtcgtgccaaaatgaccttcggcgactcgtattcgccacgacgatgtcggacccgaggtcaaaggaagaagtaagtggaaacttggtcggcacacc

SEQ ID NO: 15722 - RNA, 277 nt, Shewanella halifaxensis
  source 1..277: mol_type = other RNA; note = Related to NC_010334.1
ggtgtgctgattcaacctccaatcagccgcaaactcttctacaaaaagcgtcaaatgactcgtcaaatgaccaagaagaatttgcagattctatctgggatttttaaattctgatagatggggaaatcggagaggtttctctggaaaaaactgtcgcaatggcggcttcgccgccctagtatgtcatctctcagtatccatcgaagactcggtagagagacgacatactaggcccttgggcaaaaggtaaagtgaatggaaagttggtcagcacacc

SEQ ID NO: 15723 - RNA, 240 nt, Acinetobacter lactucae
  source 1..240: mol_type = other RNA; note = Related to NZ_BKIP01000082.1
ggtgtagtgattaaacttaccattcagccgttattactctcgaaagaggttttaactgattctacaattgtagatgggaatattggataggtattcttggaaagaacttacgttaggccgatcaagtcggcctttatatgtgtgtgcccctaaaggaagccatcggagtcttgtagacacacacatataatggacacaaggtccaaaggattaggtgaatggaaatttggtcactacatc

SEQ ID NO: 15724 - RNA, 256 nt, Acinetobacter sp.
  source 1..256: mol_type = other RNA; note = Related to NZ_LMED01000026.1
ggtgtagtgattaagtttcactattcagccgttactgctctctacctaatagagactttaactgattctacaattgtagatgggaatatcggatagatatttttggaaagaactcacgataggtcgataaaatcgacctttatatgtatgcgcctttgaagtgaacttcaatagaccttcgaagccttgtagacgcatacatataatggacacaaggtccaaaggattaggtgaatggaaacttggtcactacacc

SEQ ID NO: 15725 - RNA, 240 nt, Acinetobacter pittii
  source 1..240: mol_type = other RNA; note = Related to CP029610.1
ggtgtagtgattaaacttaccattcagccgttattgctctctaagggagctttaactgattctacaagtgtagatgggaatatcggatagatatttttggaaagaactcacgttaggccgatcaagtcggcctttatatgtgtgtgcccctaaaggaagccatcggagtcttgtagacacacacatataatggacacaaggtccaaaggattaggtgaatggaagtttggtcactacatc

SEQ ID NO: 15726 - RNA, 273 nt, unidentified
  source 1..273: mol_type = other RNA; note = Related to QMMV01000171.1; note = Deltaproteobacteria bacterium
ggtgtgccagccaggggaccattcagccgtctccctctgggtttatcaatccagggaagacagattctgccgcagtgatgtcggcagatggggaagtcggaaaggcttctctggcaagaaccgacgctacggcggctacgccgcccgtgacgccggacgctaccgcgtccgtcaatgtcgtgtcccaacggccttcgaagcctcggaagggccacgacattcacggccccaaggggctgaaggaggagtgaatggaaacctggtcggcacacc

SEQ ID NO: 15727 - RNA, 223 nt, Vibrio parahaemolyticus; identical to SEQ ID NO: 15664
  source 1..223: mol_type = other RNA; note = Related to CP006008.1

SEQ ID NO: 15728 - RNA, 198 nt, Bilophila wadsworthia
  source 1..198: mol_type = other RNA; note = Related to NZ_KE150238.1
tatgggggatactcatgtatctagcggtcgcctgcttttcttagtgaagagcagcatgggacggatttccgaaccagcaaagttgtaacatgtcttcgacattcatgtgctcgccttattactccggagcctcgtgaacggcaagcacatgaatctcgcttcgcgagttaaaagtagatgcaaagagtatcccccaat

SEQ ID NO: 15729 - RNA, 204 nt, Desulfovibrio sp.
  source 1..204: mol_type = other RNA; note = Related to JAJQDW010000013.1
agtatagggggaaagttgcgatctagcacttcggcctgtgtttgttcacagcctggggaacggaatccgaacccttgcattgaagcaccttttaaactgcgatatagctacgtgagtccttgaggctccggggtctcacaaggactcacgcagctatttcgcgccttgcgctaaaagtagatgcagcaactttctccctatact

SEQ ID NO: 15730 - RNA, 206 nt, Treponema sp.
  source 1..206: mol_type = other RNA; note = Related to NZ_JHVB01000001.1
ttgcaggcaccaaattattagtctagctactcgtaatgagacctgttttaaaaacatttggaaagacagatttctgtttttcttggtaaaatcgaccgcttaatatttctgtcaatggaagcctcgttcctacgcagtggcttgggtcgtttccattgatagatatacatcatggttaaagtagatgaaaatttggcagcctgctc

SEQ ID NO: 15731 - RNA, 246 nt, Arthrobacter sp.
  source 1..246: mol_type = other RNA; note = Related to JAFIBQ010000001.1
ggtgaggagatggtagaaggtggcctagaaatgaagttgcggcgtcgtcgtgactcgttgagcgatatcgctcaagtggttcgttttcgaacctcggtgccccggatagccggcgcattcggactagctcgcgcaacgcgtgcaagcacggacaggccgccctgcgtgtgccttcgggctcttcctgcccgtggatccctccgggatctcccatcagagtaggcccaaatttgccatctcctcatc

SEQ ID NO: 15732 - RNA, 245 nt, Cryobacterium sp.
  source 1..245: mol_type = other RNA; note = Related to SOHL01000027.1
ggtgaggagaccggtgcccggacacctagtgatgaagtcgggacgtcgttccgactcgttgagcattcgtgctcaagcgattcttcttagaattgcgggatcttcgcaaacggagattctcggacaagctcacgcaacgcgtgtgtgcacggacaagacgccctgcgttgtctccgggctcctcttgcccgtgaatccctggcgggatttcgagtcagagtagatgtccacaccgtcccctcacc

SEQ ID NO: 15733 - RNA, 239 nt, Cryobacterium sp.
  source 1..239: mol_type = other RNA; note = Related to NZ_PJJL01000059.1
ggtgagaggaaagttttttagtctagagatgaagtcgtgacgttgtcatgactcggtcggtgaaagctcgatgatccgcattcggatcggggtcatagcaaactatgactttcggactagctgtcgcaacgcgtgtacctgcggacaaaccgcccctacggggacttcaggctccctttgcccgcacatccctacgggatagaagaactcaaagtagatgacgaagctttcctctcacc

SEQ ID NO: 15734 - RNA, 219 nt, unidentified
  source 1..219: mol_type = other RNA; note = Related to NZ_QETB01000005.1; note = Proposed Ancrocorticia populi
ttggagagatcgcagcgaagcggttgtgccagttttctggctcgaagggttgaggggattcccctcaatctggggtgcggctgaccgtgctctacggaagagcttccgcaatggttgggcggcggcagctatctgctacgcatctacctgccgtcccgccccgttccggcaactctccgtttgacaacgtcgagatcaaagttagttgcgatcctccac

SEQ ID NO: 15735 - RNA, 218 nt, Luteococcus japonicus
  source 1..218: mol_type = other RNA; note = Related to RKHG01000001.1
gatgaggagcatccgtaggtgcgcctagattgccacccatcgcggtggtcggatctcgggttggacttctaaagtcccgcctccgcacgagcttccgctacgcctgagttgcgacctcccacccccggtggcgtgtgcctttccgggtgcaggagcccgcaaccgaggggacttcgtcaaaatattgggtaggttcatgtctatagatgctcctcatc

SEQ ID NO: 15736 - RNA, 232 nt, Agromyces mariniharenae
  source 1..232: mol_type = other RNA; note = Related to NZ_VSSB01000001.1
ggtgaggagggagcgttcgcttagtgatgaagctgccgccttgcggcagctcgctagggcgcaaccacagtgttgcgcccgtaggtcctggctaaccacgaccgtaggacgagccgaggctacgcgtggagctggatggcaagttcctgtcctcgatgactcggggccttcccatccagacctgcgtgaccctgccgggtcgaagggtaagtgaacatgcgccctcctcacc

SEQ ID NO: 15737 - RNA, 216 nt, Microbacterium ginsengisoli
  source 1..216: mol_type = other RNA; note = Related to JYIY01000074.1
gatgaggggaagaactggtctgcttagtgatgcagccggcacgttgtgtcggctcgtggagtcgactggctccaggacgcggctgaccgcgttcaccggacgagctcaggctacgcgtggtggggcaaacgccacctacctacggagcctggggaggcgttcgccccacccttcgggaccgggggtcaaagtaagtggctgacgcttcccctcatc

SEQ ID NO: 15738 - RNA, 218 nt, Demequina sp.
  source 1..218: mol_type = other RNA; note = Related to CP096184.1
ggtgaggagagaaccgcgttacttagagacccgatcagcacgtagtgctgatccgaatggcacttgtgccttggggtacagctcactgtgctctgcggacgatcacacgcctccgcgtgaatcgacaagcgcgtcaggcctacgctgtctggcgacagcgctcgtcgatcccttcggggccggaggccaaaggtaagtgacaagggactctcctcacc

SEQ ID NO: 15739 - RNA, 214 nt, Rhodococcus sp.
  source 1..214: mol_type = other RNA; note = Related to WOXZ01000002.1
gatgaggagtcgaggtggtgaatctaggacgccggtgcctcgcgccggcacgtcgagtcgaacggctcgaaggtcacggctgaccgtgatcgttggactatccctcgctacgcgtgcccgggcgaacgtgacatttcccgacgcgagctggggccacgtccgcccgacctgtcgggataacaccaaaagtagatgaacccctcgactcttcacc

SEQ ID NO: 15740 - RNA, 217 nt, Mycobacterium grossiae
  source 1..217: mol_type = other RNA; note = Related to CP043474.1
ggtgaggagtcgggtggcgaacctagcggagtcggtgcatcgcaccgacggatcgagccaattggctcgaaggtcgcggctgaccgtgaccgtcggacaagctcccgctacgcatggtcaggcgaacctcgcctgccgacggagactggggcgacgtccgcctacccttccgggattacaccaaagtataagtagatgaaccatccggctcctcacc

SEQ ID NO: 15741 - RNA, 214 nt, Kocuria subflava
  source 1..214: mol_type = other RNA; note = Related to JAAVUN010000029.1
gatggggagccgagtgggggatctagcgaagccgacgcctagtgtcggcgcatcgagtcgcaagactcgacggttgcggctgaccgtaaccgatggacgagccctcgctacgcgtggggaggcgaacctgcccaacgccgacgcaggctggggggcatgtccgcctacccttgcgggatgacaccgaagtagatgaaccactcgtctcctcatc

SEQ ID NO: 15742 - RNA, 212 nt, Actinophytocola oryzae
  source 1..212: mol_type = other RNA; note = Related to SOCP01000015.1
ggtgaggagacttgtggaacacctagtgatgccgatacatggtatcggcgcgttgagtcctatggctcaatggttgcggctgactgcaaccgccggacgagcctgcgctacggttggcgaggcgaagccctctggcccgacggagactggggaggacttcgcctcccctgtcgggatatcaccaaagtagatggaccactcgtctcctcacc

SEQ ID NO: 15743 - RNA, 212 nt, Modestobacter sp.
  source 1..212: mol_type = other RNA; note = Related to NZ_LMQC01000012.1
ggtgaggtggcgggaggcgcacctagtgaagccggtgccttgcaccggtcggtcgggccttctggcccgaggaccacgccttggcgtggtcatcggacgagctgccgctacgcgtggctgggcgagcacacttcgccgacgacgactggctgtgcactcgcccatcccttcgggaatacaccaaaagtagatgagccaaccgccacctcacc

SEQ ID NO: 15744 - RNA, 234 nt, Corynebacterium deserti
  source 1..234: mol_type = other RNA; note = Related to NZ_CP009220.1
ggttaggggaaaaatggtaagtttagcgatagttactacgtcgtagtaacactcgccccatttgttggggtgtaagtttgatttggtgcacggaggaagccttagttttcctctgcggtcgagcggatgctctcttgctgcgcgcgggatgctctttacctacacgctcgttccgaaagagcctcccgcaccccaggcaaggctcagagtaaatgaacaatttttcccctaatc

SEQ ID NO: 15745 - RNA, 217 nt, Glaciihabitans tibetensis
  source 1..217: mol_type = other RNA; note = Related to PVTL01000007.1
attgagatgagacgcgtgaacagcctagagatgaagcctgctaaaaaagcaggctcgggcatcgaaaggtgtcaggttgcagcgctctgtgatcggcggccaagccatcgattcgaaggcgccgggaagcttccgcttcccgaagcctcgaaaagcggaagctccccgccccttcgggggaggattaaagtaggtgactagcgcgcctcatctcaac

SEQ ID NO: 15746 - RNA, 219 nt, Cryobacterium arcticum
  source 1..219: mol_type = other RNA; note = Related to NZ_QHLY01000005.1
actgaggtgagattcgtgcaatacctagggatgaagcctgtccatgcgacaggctcgggcatggaagcatgtcaggttgcagcactctgcggtcgccggccaagccagcgattcggaggcgacggtgaggctttcctccccgaagtctcgatgagaaaaccctcaccgtccccctccgggggaggttcaaagtaggtgcgtaacgaagcacacctcagt

SEQ ID NO: 15747 - RNA, 215 nt, Arthrobacter ulcerisalmonis
  source 1..215: mol_type = other RNA; note = Related to NZ_UXAU01000021.1
actgaggtgaacgagtgaattacctagtgatgaagcctggcatattgcctggctcgggcaccgagaggtgtcaggttgtggcaatccacgaccggtggacaagcttccgattcggaggcgtcggtgagtgattcctcctcgaagtctcgacgaggaatcactccccacccctccggggaggttcgaagtaggtgagcacagacgcgcacctcagt

SEQ ID NO: 15748 - RNA, 219 nt, Plantibacter sp.
  source 1..219: mol_type = other RNA; note = Related to JADKSK010000002.1
gctgaggtgagtgttgtatggaacctagtgttgaagcctggctaattgcttaggctcgggcgtcgagaggcgtcgggttgtgacaattcacaatcggcggccaagctatcgattcggcggtgatggtggggcctcgccccccgaagcctcgaagggcgaggccccaccatccccctccgggggagaatcagggtaggtcaagtgagcactcacctccgc

SEQ ID NO: 15749 - RNA, 185 nt, Streptomyces anulatus
  source 1..185: mol_type = other RNA; note = Related to NZ_CP080029.1
gctcagggaggggcgctgagatctagtactgccggttccgtcgggaccggcccagccgggtctccttcgtggagccccggaggcagggcggcaccgtgggtgccgtccgtgaatcaactcccgcgtgacctggaaggtctggccggggggaacgcaaaggtagatggtcagcgcctcccctcatc

SEQ ID NO: 15750 - RNA, 185 nt, Streptomyces atratus
  source 1..185: mol_type = other RNA; note = Related to BMRN01000021.1
gctcagggaggggcgctgagatctagtactgccggttccgtcgggaccggcccaaccgggtctcttcacagggcccgggggcagggtggcgtcgtgggcgctgcccgtgaatcaacttccgcgtgaccgtgtggtcgggccgtcggaaggaaagtaaaggtagatggtcagcgcctcccctcacc

SEQ ID NO: 15751 - RNA, 232 nt, Micromonospora saelicesensis
  source 1..232: mol_type = other RNA; note = Related to NZ_FMCR01000007.1
cctgaggggagccgtgtgacatctagatccaggtcggcccgtcgggtcgaccacggccgcagcgagtccgcggtgcgagagcgggccgtgagtttctcacgcgctccgttcaatcccacgttcgcgtgcggtcgcgaagacgctgcatcctcgatgcctcggcgcgtcttcgcgaccccgctgccgcgatgggaaggaattcaaaggtagatgactatcggctcccctcacc

SEQ ID NO: 15752 - RNA, 230 nt, Actinoplanes durhamensis
  source 1..230: mol_type = other RNA; note = Related to NZ_BOML01000042.1
gctgaggggagccatgtgacatctagatccgagtcggcccgtcgggtcgaccacggctgcgggcaaaccgcggtgcgcaagcgggtcgtgggtttactgcgactccgttcaatctcgcgttcgcgtgggtcgcgaaggcgctgcatcctcggcgcctcggcgcaccttcgcgaccatgctgccgcgcgagaaaggaatccaaaggtagatgacgactggctcccctcacc

SEQ ID NO: 15753 - RNA, 235 nt, Amycolatopsis sp.
  source 1..235: mol_type = other RNA; note = Related to JAAGNB010000860.1
actgaggggggtcgatgacttctagttatccggtatcgttgatgccggggcggccggaacggtcttccgtttcggggcatacgtgcaggcgacagattgcactgtcgtctcgatcaaacccacgttacgccgagtggtgcaacgcgaagctccgggtcgatgtctccgggttcgcgttgcaccattcgctccgctgaagggccccaaaggtagatgatcaccgactcccctcatc

SEQ ID NO: 15754 - RNA, 227 nt, Streptomyces niveiscabiei
  source 1..227: mol_type = other RNA; note = Related to NZ_LIRL01000059.1
cctgaggggggtccgtgacgtctagcgtctgtcgatgccgttggtgtcgacaccgccgggttggacccggggcttatgcaggcggcgggatacccgcaagcctggaccaaacccgcgcttcgcctcctgccgtgaaccgcgctgctccggcgatgtcttgggcgcggctcacggcacgactggcgtcgcggaggctcaaaggtagatgatcactggctcccctcacc

SEQ ID NO: 15755 - RNA, 204 nt, Phytohabitans houttuyneae
  source 1..204: mol_type = other RNA; note = Related to NZ_BLPF01000004.1
attgaggggagtcggtgcgatctagataccgtcggggccgttggccccgacacagctagccggcgccgttggcgccggcgttggtcaagcccgcgcaagcgcctggaacgagtggcgtgcctggtccctcggggcctcggcgtcacgccactcggccctgccgggcggagaatcgaaggtagatgcgcaccgactcccctcacc

SEQ ID NO: 15756 - RNA, 216 nt, Virgisporangium aurantiacum
  source 1..216: mol_type = other RNA; note = Related to BOPG01000023.1
cttgaggggggccgttgacatctagaaccgtcggagccgtcggctccgacacaggggcgacgagtccgttgccggcaccgtgggtgccggcgttggtcaagcctgcgctcgcgtctggaaacgcgtggcgtgccttaccctcggggtctcggccgtcacaccacgcggcaccctccgggtgcatccgaaggtagatgactatcggcccccctcacc

SEQ ID NO: 15757 - RNA, 225 nt, Streptomyces sp.
  source 1..225: mol_type = other RNA; note = Related to CP063844.1
gcgggagagtcggtgacggcctagcgcaatcgacgaggtcatcgtcgagtcaacggtctgcatttgcaggtcaggctgcggtcgtgagccgcacgctgtggacaagctgtcgaacgcctggatggtgcgaggcgcacgtgctcctacgggggtctggcgcgcgactcgcaccagcccgccggggcgggatacaccgaaggtaggccaccccatcgactctcccgc

SEQ ID NO: 15758 - RNA, 233 nt, Verrucosispora sp.
  source 1..233: mol_type = other RNA; note = Related to SISL01000011.1
gcttagggggagtcggtgacacctagagatgtcggtggggcttgctgggcaggctgcatcgacgcagatggcccgcaaggcgggccaggcggatggcgttgccgatccgctgtggagaaacctccgaagcgcatgcggcgcgaagcccaggcttctcctacgtgggcctggggcgtgggcttcgcgaccctggcgggatggcaccaaaggtagatgtcaaccgactcccccgc

SEQ ID NO: 15759 - RNA, 230 nt, Nonomuraea sp.
  source 1..230: mol_type = other RNA; note = Related to SSXE01000007.1
gttgaggagggccggtgacatctagtgcgtccgatacctcgcgtatcgacgcggaatggtggttgttccgacgaccacccggcattcgatgtgatcgggtgctgcggacgatcctgctaccgcctgaggggtgtcctcgcgcttcctcctacggggcctggcgcgagaggacacccttgggcttcaggcggaaggacatcaaaggtagatgatcaccgactcacctcacc

SEQ ID NO: 15760 - RNA, 232 nt, Nonomuraea polychroma
  source 1..232: mol_type = other RNA; note = Related to SAUN01000001.1
actgaggagagcccgtgagatctagagttgtccggtgccgagagggtatcggcgagatgggcggctattttgcagccgcctgggcgcacggcgtagtcgtgcgctgcggacaagctcctgaccgcctgcccgggaaactcgccctgatcctacgtgagcctggggtcgagttccccgcgctagccagcggacaagggacatcaaaggtagatgatcactgactctcctcatc

SEQ ID NO: 15761 - RNA, 213 nt, Micromonospora aurantiaca
  source 1..213: mol_type = other RNA; note = Related to NZ_CP084582.1
gctgaggagagtcgaggatgtttagcatccagcgtttcgacgctggcacgccgggcatagtccggcgggcaggggatgtcatcctctgcgttggccaagctctcgccgacgccgggcaagccgacggtgccgcgcgcggggccttcacttgcaccgccgcctgtccatcggcggaaggacttcaaaggtaaatgaccctcgactctcctcacc

SEQ ID NO: 15762 - RNA, 211 nt, Micromonospora humida
  source 1..211: mol_type = other RNA; note = Related to NZ_JAFEUC010000033.1
cttgagggagtcgtaggcgtttagcggcccggcatcgtgccggcattcgccagggatgccctggcggcggagagggttaccctccgttgtggacaagcactcgctaccgccgggaacagcacagcgaacccgggcgtatgcctggggcacgctgcgctgcgcctgtcggcgtggggaggccaaaggtaaatgacctacgactccccccacc

SEQ ID NO: 15763 - RNA, 221 nt, Pseudonocardia pini
  source 1..221: mol_type = other RNA; note = Related to JACASO010000007.1
gctgaggggggtcggtgacatctagtgattgctggcgccgtgggcgtcagcgcatcccgggcatgtcgtgtccgggagcgtcgagcgttgccgacgccgtggacaagctgacgctgcgccttagcaggcaaagcgcgtctgtcctcgtgtgcctcaggaagcgctctgcctgctccctggcgggaatacaccaaagtagatgatctccgactcccctcatc

SEQ ID NO: 15764 - RNA, 233 nt, Frankia inefficax
  source 1..233: mol_type = other RNA; note = Related to NC_014666.1
gttgaggggagttggtggcatctagttgctccgaggtacgttctcgggccgatcggttccgtagagctacgctctacgagttccaaggcggatggcgtcgccatccgtttcgatcaagctctcgcctacgcctcctactgctgaacgagcgctatcctacgacgtctgggcactcgttcagcaccagcccggcgggattcaccaaaggtagatggtcatcgactcccctcacg

SEQ ID NO: 15765 - RNA, 217 nt, Mesorhizobium sp.
  source 1..217: mol_type = other RNA; note = Related to SAQH01000043.1
ggtggggcgctgaatttagcgttgcccgcaagcttcggcttgcgggcgtccacgttaggcaactaacagggcgagcgcgtcgcgctttgcttaggagaagcagccgccagtcgcgccggtggcgaagcggactaagggctctgcggggtctagggcgtccgctccgccatcgtctcgcgaagcgagtcaaagtaaatgacagtagcctcaccccacc

SEQ ID NO: 15766 - RNA, 219 nt, Mesorhizobium sp.
  source 1..219: mol_type = other RNA; note = Related to JAFKIC010000112.1
gttgagggtgggacggtagcattttagcgttacttctactcagaagtgttccgtgtcgggtttccgacgtggcgggtgcgtcgcaccttgcttaggagaagccaacgccagtcgcgccggtggtggagtgaactcagttcttcacggagcctaaagcgttcactccaccatcgcctcgcggcggcgagccaaagtaaatgacttctatcccaccccact

SEQ ID NO: 15767 - RNA, 214 nt, Sphingopyxis sp.
  source 1..214: mol_type = other RNA; note = Related to NZ_LNSC01000016.1
actgcgggcggggcgttaacagctagcgttgccgacgggtaaccgtcggtgtccatccggtaagccggcggccgagtgcttcgcattcggctggtaaaatcagccgccattcgcgccggcgagaagcaagacttcctctctcggggtctcaagccgtctcgcttctcgtcgtcacgggggtgaccaaagtagatgatcagcgcctcgccccacc

SEQ ID NO: 15768 - RNA, 207 nt, Sphingomonas sp.
  source 1..207: mol_type = other RNA; note = Related to NZ_JAGIOU010000001.1
ggtggggcggtgacttctagccatgccgatcgttgatcggcctccacgtcgggaaaccggcagggaaagcgcgtcgcgcttacggaagaagcacccgccagacgcgccggtaggagaagggcccttcctctttcgtgatgactgcagggcttgccccttcccctatcgacccgcggatgcgccagagtagatgatctccgcctcacc

SEQ ID NO: 15769 - RNA, 222 nt, Tsuneonella dongtanensis
  source 1..222: mol_type = other RNA; note = Related to NZ_CP016591.1
actgagggcggagcgctgagcatccagcttcccccggccgtaaaggccggaccaagtcgcggggttcccgcggcgggctggcgcgttgcgcttcgcctgggaaacggagtcgctgagatcgaccttagtgaagcgaacttccgctcttacgatgtctgggctcgtccgctccactatggcctccttacgggtcaaagtgaatgatcagcgcttcgccccacc

SEQ ID NO: 15770 - RNA, 222 nt, Sphingomonas formosensis
  source 1..222: mol_type = other RNA; note = Related to NZ_WRPK01000013.1
actgagggcggagcgttgagcatccagcttcccccggccgtaaaggccggaccaagccgcggggttctcgcggcgggctggcgcgttgcgcttcgcctgggaaacggagtcgctgagatcgaccttagtgaagcgaacttccgctctgacgatgtctgggctcgtccgctccactatggcctccttacgggtcaaagtggatgatcagcgcttcgccccacc

SEQ ID NO: 15771 - RNA, 222 nt, Sphingomonas sp.
  source 1..222: mol_type = other RNA; note = Related to NZ_LMQP01000002.1
gctgagggcggagcggtgagcatccagcctcccgccggccgcaaggccggtccatgccccggctcgtccggggcgggctggcgcgtcgcgcttcgcctgggagaaggtgtcgccgtgatcggccatggtgaagcggactccggcaccgacgaggactgggctcgtcccctccaccatcgcctcctatcgggtcaaagtggatgatcggcgcttcgccccacc

SEQ ID NO: 15772 - RNA, 236 nt, Agrococcus carbonis
  source 1..236: mol_type = other RNA; note = Related to LT629734.1
ggtgaggcggctctacgaactagtgcagttgccgggttccggcaacgccggctcgggctggcagagtgtgcagcctgaggcgtccgcaggacgtgccggcaggagacctgtcggcatgagaaatcgaccgcttccggaagcagcgcgactctcgcttggttcctcggagcctcggcgcgagagccgcgcggcccctccggggccttatcgaaggtagccagtggagtcgcctcacc

SEQ ID NO: 15773 - RNA, 226 nt, Curtobacterium sp.
  source 1..226: mol_type = other RNA; note = Related to QKSO01000004.1
ggtgaggggatcccgcgttagtcaagagtcggtaccgtcggtatcgatcgcccctagtagttgaaggggagccttgcggccgcttcgaatcggagattcggagcgtggaaaatctcccgcttccggaaggatcgcagcacccgcttccccctcgaagactcgggacgcgcgcgctgcgttgcccctccggggctatgaccaaaggtaacgatggaatcccctcacc

SEQ ID NO: 15774 - RNA, 258 nt, Agromyces mediolanus
  source 1..258: mol_type = other RNA; note = Related to JAINWC010000029.1
ggtgaggaggctcgacgggactagcaaagcgccgccacgttacgtggcggccgtctctgcaaactcctgactgagttcacgagctagccagagaacgccgaacccggcgcatccgcgcgatactcgcgggtgagataaatctgtcgcttccggaaggatggcgaccctcgcttgcccctgcggcaggacttggacgcgagggccgcccgcccctccggggcactaatccaaggtagtcgccagtggagtctcctcacc

SEQ ID NO: 15775 - RNA, 230 nt, Frondihabitans sp.
  source 1..230: mol_type = other RNA; note = Related to NZ_RKQW01000003.1
ggtgaggggaacgatcacggtcagaaaaagccggcaacgttggtgccggcactccgaagcatttgtcttcggcgtcgcgtgcgacgagggctaaatcgttgattgggcctgagcacaaactcacgattacgcagagcaagtcgaactcctctcggtcgctgtctcggtcgacgagcccgactgtccctccgggatcgatccaaggtgacctatgaaaacttcccctcacc

SEQ ID NO: 15776 - RNA, 251 nt, Rathayibacter sp.
  source 1..251: mol_type = other RNA; note = Related to PSVB01000001.1
ggtgaggggaaggattcgggttagagaacgctcgcgaccatggtcgcgagccccacgcgcggcgctgccggaaggctgcaaagcacgatgcgtccatcggacgacgctcgccccggaggggtgggcgcggagaaaactggcgcttacggagacttccgagcgactcaaacaaagtcgcggtcttctccgttgagccgctcgcccctccggggcggacaactgaaggtaaccgttgaatctttctcctcacc

SEQ ID NO: 15777 - RNA, 254 nt, Bifidobacterium apousia
  source 1..254: mol_type = other RNA; note = Related to JACFRS010000007.1
ggtgaggggaggtaagagtgatcttagcgatggttagcatatgctggcccgggagcggcgatttaaaactgctcgggaaagaagttcaaaagcccagaaacgcatttattagtttctgcgtacgatctcacgaacgcctgaaggtggagggttcaagcagcctacgaagtgcgactggctgctctcgagaaccctccacattcgctacgctctaccataggtcaaacagtaagtgatctctttctctcctcatc

SEQ ID NO: 15778 - RNA, 256 nt, Micrococcus luteus
  source 1..256: mol_type = other RNA; note = Related to NRSP01000001.1
gatgagggaggcttatttttgcctagtgttcccgaggatgagcaacttcctcggaggcggagttgaagtgattgtttcacataacttcgtatacagacgcaccccgctctgtattgggcctaaggagcttgggcctacggctaacgactcgcctcttggtgaatcggcggctcggccttacgtatcgttggcctttgcgagccgccgatgcgccttcggcgctgattcaaggtaggtaagatgagcccccctcacc

SEQ ID NO: 15779 - RNA, 221 nt, Pseudomonas fluorescens
  source 1..221: mol_type = other RNA; note = Related to NZ_JSAL01000022.1
ggcccacagaggctagtacgttagagtgtagtcgctctcaaggttaaggatttcgataaccgaatatcgcaaccatcagcggtgaagcgtgctgatggatgcgatgctccgccgcttcgcggctccgcagtcgaaaggcgcacaaaagcgggctccgcccgcttccgcacgcctttcgactaaagagcccgcttagtttagaaggtagtcatctgtgggct

SEQ ID NO: 15780 - RNA, 238 nt, Pseudomonas putida
  source 1..238: mol_type = other RNA; note = Related to NZ_CP010979.1
tgcccgcagaagctagtatgctggagtgaagtcgctcccaaggttaaggttcatgataaccgatattgcaaacaccggcgatgaagcataccggcgcttgcaatgctacaacgcttcgcgtttccgcaaaccttgaggtgcacgaaagcgggcttcgcccactttcgcacacctcaaggtttagagcgcaagtctaaaagcaaaagcggattggaaaacaggtagctatctgcgggca

SEQ ID NO: 15781 - RNA, 217 nt, Pseudomonas viridiflava
  source 1..217: mol_type = other RNA; note = Related to NZ_UTCV01000052.1
tgcccacagaggctagtacgatggagtgaagtcgctcccctggttaaggtgttcgataaccgatattgcatccaccggcggtgaagcataccggcggatgcaatgctacaacgcttcgcgtttccgcaaaccgcaaggcgcacaaaagcgggcttcgcccactttcgcacgcctcgcggtttagagcgcgagtctagaaggtagtcatctgtgggtt

SEQ ID NO: 15782 - RNA, 217 nt, Pseudomonas haemolytica
  source 1..217: mol_type = other RNA; note = Related to JAEKDB010000004.1
tgcccacagaggctagtacgttggagtgcagtcgctccctaggttaaggtgtccgataaccgatattgcaaccactggcggtgaagcataccagtggctgcaatgctacaacgcttcgcgtttccgcaaaccgcaaggcgcacaaaagcgggcttcgcccacttccgtacgcctcgcggtttagagcgcaagtctagaaggtagccatctgtgggct

SEQ ID NO: 15783 - RNA, 219 nt, Pseudomonas sp.
  source 1..219: mol_type = other RNA; note = Related to NZ_JAGYGI010000002.1
tgcctgcagaggctagtacgtaggagtgtagtcgctccccgggtcaggttcccgataaccaagaatcatgcgctcagcggtgaagcatgctgaacgcatgatgcttacaaaacgcttcgcgttttgacgcagtaatctccagcgagaattccgcttcgcgcaattatcactggagattatctgaccatgctaaagtatagaaggtagcctctgtaggtt

SEQ ID NO: 15784 - RNA, 219 nt, Pseudomonas protegens
  source 1..219: mol_type = other RNA; note = Related to NZ_LHUU01000009.1
cgcctacagaggctagtacgtaggagtgtagtcgctccccgggtcaggtttctgataaccaagaatcatgcgtccagcggtgaagcgtgctgaacgcatgatgctttcaaaacgcttcgcgttttgacgcagtaatctccagcaagaattgcgcttcgcgcaattatcactggagattatctggccatgctaaagtatagaaggtagcctctgtaggtt

SEQ ID NO: 15785 - RNA, 230 nt, Pseudomonas fluorescens
  source 1..230: mol_type = other RNA; note = Related to CABVIS010000011.1
tgcctgcagaggctagtacgttggagtgcagtcgctccccgggtaaggttcccgataaccaagttatagtaactccagcggtgaagcgtgctgaagttactatacttacaaaacgcttcgcgttttgacgtagtccactccatccgcaatttcgctgcgcgaaattacgaatggagtaaacaaagtcaaaagcaaagctgctaaagtacagaaggtagcctctgcaggta

SEQ ID NO: 15786 - RNA, 230 nt, Pseudomonas sp.
  source 1..230: mol_type = other RNA; note = Related to NZ_JAIWYL010000001.1
ggcctgcagaggctagtacgttggagtgtagtcgctccccgggtaaggttcccgataaccaagttgtagtgacttcagcgatgaagcgcactgaagccactacacttacaaaacgcttcgcgttttgacgttgctccacccatccgcaatttcgctgcgcgaaattacagatgggtaaaacaaagtcaaaagccaagctgctaaagtaaagaaggtagcctctgcaggtt

SEQ ID NO: 15787 - RNA, 229 nt, Pseudomonas chlororaphis
  source 1..229: mol_type = other RNA; note = Related to NZ_CP027656.1
tgcctgcagaggctagtacgatggagtgaagtcgctccccgggtaaggttcccgataaccaagttgtagtaacttcagcgatgaagcgcactgaagttactacacttacaaaacgcttcgcgttttgacgtggtccatctattcgtaatttcgctgcgcaaaattacgaatagataaaacaaagtcaaaagcaaagcagctaaagtacagaaggtagcctctgcaggtt

SEQ ID NO: 15788 - RNA, 215 nt, Citrobacter telavivensis
  source 1..215: mol_type = other RNA; note = Related to CP045205.1
agcttacagaagctagtatgttggagtgtagtcgctccccgaactaaggttcgcgatagccaacactcaaggatgattttgtaccaaattcatccttgagttgacaaaaggactgcgtcctttgtgtcgggatcagaacacaataaaattagcgtatcgcaaattttattgcattctgatctgttgcaaagtattgaaggtatcttctgtaagct

SEQ ID NO: 15789 - RNA, 217 nt, Tolumonas auensis
  source 1..217: mol_type = other RNA; note = Related to NC_012691.1
ggcttacagaagctagtacgttagagtgtagtcgctctccgggataaggctcccgttaaccaacgtacaataactattcaaaaagcgaatagttattgtaccgtaccaaaaggactccgtcctttgtggtagctcttaagttaagaaaatattgcgtgtcgcaatattttcttacttgaagaggggttgcaagtaaagaaggtagcttctgtaagct

SEQ ID NO: 15790 - RNA, 217 nt, unidentified
  source 1..217: mol_type = other RNA; note = Related to JABSQN010000005.1; note = Piscirickettsiaceae bacterium
ggcttgcagaagctagtatgttggagtgtagtcgctccccgaggtaaggccctcgttaaccatggttccataaagttgctatcgcatttatggtacttcaagaaatagctatcgctattcttgaaatagcataaaggagcctgtttttatgcgcatccgcataaaagcaggagcctttatgcttatgctaaagtatagaaggtagcttctgtgggtc

SEQ ID NO: 15791 - RNA, 218 nt, Gimesia chilikensis
  source 1..218: mol_type = other RNA; note = Related to NZ_CP036266.1
aacttacagaagctagtacggtaagagtgtagtcgctctcaagggtaaggtgcccgttaaccatgtaccaccaaaagagagctaaagatctcttttggtggtgccatcgataaactcgtttatcgatggcagtcacacaagctcataaagtttgcgcgatcacaaactttacgatcttggagactgcatgcaagtccagaaggtagcttctgtaagtt

SEQ ID NO: 15792 - RNA, 202 nt, Idiomarina abyssalis
  source 1..202: mol_type = other RNA; note = Related to NZ_CP081832.1
ggctctaagaagctagtagttttgagcgagtcgctcatgtggctgaggtttactttaaccgatgcaagaaaagcaaatgatgcaaaattttgccagcaaaattttgcatcaccactgaatcattaacaatagtcgcgtttcgcgactcttgcaaatgattcagtggtgtgcacgcaagtatagaaggttgtttcttagagcc

SEQ ID NO: 15793 - RNA, 233 nt, Pseudomonas aeruginosa
  source 1..233: mol_type = other RNA; note = Related to CP049161.1
agcttacagaagctagtacgttggagtgtagtcgctccccgggctaaggtgcccgttagccaagacatacaaaagcaaaagcgaaaggaagcttttatttttgtatgtacctaaagatttgaaaaaagactcaaatctttaggtagtactaaaatcaatcactttttgcgcacgcgcaaaaagcaattgatttatagtacgcttgcaagtacagaaggtagtttctgtaagct

SEQ ID NO: 15794 - RNA, 238 nt, Serratia fonticola
  source 1..238: mol_type = other RNA; note = Related to JAENMP010000010.1
ggcttacagaagctagtatgttagagtggagtcgctctcatgattaggtccgggttaacccagttcatgggaattgcaaaattccgcaattcccatgatagtgataataaaacctcgcagcgaacgttttcgctgctcgcttttattatctggattgaatcagcaaatttttgcgttttcgcaaaattttgccgcttcaatccacaggctaaagtattgaaggtatcttctgtaagcc

SEQ ID NO: 15795 - RNA, 238 nt, Buttiauxella noackiae
  source 1..238: mol_type = other RNA; note = Related to NZ_JPRU01000003.1
ggcttacagaagctagtatgttagagtggagtcgctctcatgataaggtctgggttaacccagttcatggaaattactgtaaccagtaatttccatgatgtggataataaaatctcacagcgaattttttcgctgctcgattttattatctggattggaccagcaaatttttgcgttttcgcaaaattttgccgtcccaatccacaggctaaagtattgaaggtatcttctgtaagcc

SEQ ID NO: 15796 - RNA, 238 nt, Serratia plymuthica
  source 1..238: mol_type = other RNA; note = Related to NZ_ARWD01000001.1
ggcttacagaagctagtatgttagagtggagtcgctctcatgattaggttggggttaacccagttcatgggaattgcaaacttccgcaattcccatgatatgaataataaaaccgcacagcgaagtttttcgctgcacgcttttattatctggattgaatcagcaaatttttgcgttttcgcaaaattttgctgctccaatccacaggctaaagtattgaaggtatcttctgtaagcc

SEQ ID NO: 15797 - RNA, 238 nt, Pectobacterium betavasculorum
  source 1..238: mol_type = other RNA; note = Related to NZ_JQHM01000002.1
ggcttacagaagctagtatgttagagtggagtcgctctcatgattaggtctgggttaacccagttccaaggaattgcaatgctttgcaattccttggataatgataataaagcttcgcagcgaaacatttcgctactcacctttattatctggattgaatcagcaaatttttgcgatttcgcaaaattttgctgctccaatccactcgctaaagtattgaaggtatcttctgtaagcc

SEQ ID NO: 15798 - RNA, 239 nt, Morganella morganii
  source 1..239: mol_type = other RNA; note = Related to CP026651.1
agcttacagaagctagtatgttagagtggtgtcgctctcatgattaggttcgagttaacccagttcgtgaaaattacaaaaaaatttgtaattttcacgatggtgacaacaaaaactcgtagcgaaattttcgctactcctttttgttgtctggattgtatcggataattttcgcgtattcgcaaaaattatccgccccaatccacaggctaaagtattgaaggtatcttctgtaagct

SEQ ID NO: 15799 - RNA, 235 nt, Yersinia intermedia
  source 1..235: mol_type = other RNA; note = Related to CWJI01000001.1
ggcttacagaagctagtatgttagagtggtgtcgctcactagtttaggatcgcgttagcccagtccgtaaacctctcgttgttcggtttacggaagtgggcaatataaagctcgtagctcgttactcgctactcactttatattgccggttcgatccagcaattttttgcgttatcgcaaaaagttgctgcctcgaaccactggcttaaagtattgaaggtatcttctgtaagtc

SEQ ID NO: 15800 - RNA, 238 nt, Pantoea agglomerans
  source 1..238: mol_type = other RNA; note = Related to NZ_FXUX01000002.1
ggcttacagaagctagtatgttagagtggagtcgctctcatgttaaggctggggttaacccagtccatgagaattactgaagtcagtaattctcatggggttgaaaataaattctcatagcgaagttattcgctattcgaatttatttccgggattaggtcagcaaatttttgcgctttcgcaaaattttgctgcccaaatccactggctaaagtattgaaggtatcttctgtaagtc

SEQ ID NO: 15801 - RNA, 210 nt, Janthinobacterium sp.
  source 1..210: mol_type = other RNA; note = Related to NC_009659.1
ggatagccagtagctagtgttaaggagtggtgtcgctccggttgttcaggctgaatttttccagcccctgcaaatttaaacatcaaatttgcaggaatgtgaaattggctacgccaattatcactgatcacaacactaaatttgttcgttccgaacaaatgttagcgttgtgatcgcagctaacgtacagtaggtagcgttgtactatcc

SEQ ID NO: 15802 - RNA, 209 nt, Herbaspirillum sp.
  source 1..209: mol_type = other RNA; note = Related to NZ_AJVC01000002.1
aagaggtagtagctagtgttaaggagtggtgtcgctccggttgataaggtgaaactatgcctgcgcccgaaaatttattctaaatttgtcggggggagactacgattggcaatgccaatcgtagtctcatctgaaccttacttttgttcgtctcgaacaaaagtaatcttcagatttcagctaacgtacagtaggtagcatttcctctt

SEQ ID NO: 15803 - RNA, 204 nt, Massilia sp.
  source 1..204: mol_type = other RNA; note = Related to JAGPWD010000023.1
agtgcgcagtagctagtgtttaggagcggtgtcgctccggttgctgaggcggaaatatgccagcaccgggaaattggcttcgccattttcccggtgtgaaattggcttcgccaattatcacgtatttgattgactttgtaggtcgttccgacctacaaagccactctaatatgcagctagcgtacagtaggtagctccagcaca

SEQ ID NO: 15804 - RNA, 217 nt, Chromobacterium violaceum
  source 1..217: mol_type = other RNA; note = Related to MUKQ01000009.1
tgagggagctgctagtgttaaggagtggtgtcgctccggttgctaaggctgatcttcaccagacaccgacaaatcactagaagtgatttgtcgggagcaagattgctgcagagcaactgcagcaatcgttgctagcaacaacgcatcatttgttcgaaccgaacaaatgatgtgttgttactgcagctaacgtctagttcggtagcaggctccctct

SEQ ID NO: 15805 - RNA, 220 nt, Serratia sp.
  source 1..220: mol_type = other RNA; note = Related to PYUJ01000108.1
ggcttgtagaagctagtgcgttggagtgtagtcgctccttggttaaggtccattttaaccatcaactatggagaaattttgcacgcaaaattcctccatagtcgcttagaatagctacgctattcacgcggttctttcaagctcaagatgtcgcgttccgcaacatcttgagtttgaagagaacaggatgcaaaagtacagaaggtagattctacaagcc

SEQ ID NO: 15806 - RNA, 221 nt, Proteus mirabilis
  source 1..221: mol_type = other RNA; note = Related to CP047112.1
ggcttgtagaagctagtgcgttggagtggagtcgctccttggttaaggttaactttaaccattaccaatagaatcaatttgtacacaaattgattctattgggtcgcttagaatagctatgctattcacgcggttctttcaatctcaagattcgcggcccgcgaaatcttgagctcgaagagaacgaaatgcaaaggtacagaaggtagattctacaagcc

SEQ ID NO: 15807 - RNA, 219 nt, Brenneria sp.
  source 1..219: mol_type = other RNA; note = Related to NZ_JAKMAJ010000005.1
ggcttgtggaagctagtgcgttggagtgtagtcgctccttggttaaggttcactttaaccaaagaccagacaagaattttgtaaccaaaattcccgtctggtcgcttcgaatagctatgctattctcgcggttctttcaagaacgagatgtcgcgtctcgcaacatctcgttctcgaagagaacgaactgcttagtatagaaggtagttttcacaagcc

SEQ ID NO: 15808 - RNA, 217 nt, Enterobacter mori
  source 1..217: mol_type = other RNA; note = Related to CP084692.1
ggcttgtgagtgctagcacgatggagtgtagtcgctccttggttaaggctgcctttaaccacagactcagcgtgagttttgttccaaatctcacgctgagtcgctccgaatagcgttgctattctacgcggttcatccaagttcaagatgttgcgatccgcaacatcttgttcttggaagaacggagtgtcgagtaagaaaagtagcctcacaagcc

SEQ ID NO: 15809 - RNA, 205 nt, Enterobacter asburiae
  source 1..205: mol_type = other RNA; note = Related to JAEKKB010000005.1
gacttgtagaaactagcacgttggagtgtagtcgctccttggttaagggtcactttaaccacgactatacggataactccgtatagtcgcttcgaatagcgttgctattctcgcggttctttcaaggtcgagatgtcgcgtcacgcaacatctcgctcttgaagagaacttaggtgtcaggtatagaaagtagtttctacaagtc

SEQ ID NO: 15810 - RNA, 211 nt, Halomonas denitrificans
  source 1..211: mol_type = other RNA; note = Related to JAHVIK010000003.1
agtttgcaggagctagtacgtaggagtgtagtcgctccctggttaaggttcgcgttaaccaatcacttacaaactcaaagagcgagactttgtaagtgaagggaaaatggcttcgccatttgtcccgcagtcaatatctttgatattgcgccagcgcaatctaaaagatattgacagagttgcatagtaaagaaggtagctcctgcaaact

SEQ ID NO: 15811 - RNA, 217 nt, Vibrio quintilis
  source 1..217: mol_type = other RNA; note = Related to NZ_FRFG01000024.1
agcttgcggaaactagcatattggagtgtagtcgctctgaagtttacgtcgataataacctagaactaaacacaaatttgcaagcaaaagtgtgtttagttcaccgaatagcattcgctattcttggtggcatcggttttgttctaaatattgcgtatcgcaatatttagaacaaaaccgatgagtagcaaagtatagaaagtagtttccgcaagct

SEQ ID NO: 15812 - RNA, 218 nt, Vibrio cholerae
  source 1..218: mol_type = other RNA; note = Related to DADXPV010000013.1
agcttgcggaaactagcatagtagagtgaagtcgctctcaagttaaggctaataatagcctagaactaaacacaattttgcaagcaaaagttgtgtttagtaagccgaatagcattcgctattcttggctgcatcatttttgttctaaatattgcgtatcgcaatatttagttcaaaattgatgagtagcaaagtatagaaagtagtttccgcaagct

SEQ ID NO: 15813 - RNA, 210 nt, Vibrio parahaemolyticus
  source 1..210: mol_type = other RNA; note = Related to ABBBBM010000001.1
ggcttgtagaagctagtacgttggagtgtagtcgctctcaggttaaggtgaacgttaaccattatacttacgattttcggaaaagataaaaatcgtaagtagcatgaatagcttcgctattcttatggcattgaaatctcccatatttcgcgagcgaaatctgaaagattttaatgcaatgcatagtttagaaggtagcttctacaagtc

SEQ ID NO: 15814 - RNA, 212 nt, Aliivibrio logei
  source 1..212: mol_type = other RNA; note = Related to NZ_MAJU01000008.1
agcttgcagaagctagtatgtaggagtgtagtcgctctcaggttaaggtagatgttaaccacaacttacaattttcaaaagagcgcgaaaattgtaagttgccgtgaatagcttcgctattcattcgggcattaaagctcaaatatcacgcaagcgcaatattcaagctttaatgataatgtgcaaagtatagaaggtagcttctgcaagct

SEQ ID NO: 15815 - RNA, 210 nt, Pragia fontium
  source 1..210: mol_type = other RNA; note = Related to NZ_CP010423.1
aacctattgaagctagtacattagagtggagtcgctcttaggttaaggtagccgttaaccgtgtatctaaaatttcttgcagaaattttagatacagataggtaaataactttgttatttaccattaaaaacgtacaactttcgcatacgaaagttgtaaatttttaatgatgattgaacgcgtagtatagaaggtagcttcaataggta

SEQ ID NO: 15816 - RNA, 189 nt, Pseudoalteromonas galatheae
  source 1..189: mol_type = other RNA; note = Related to NZ_PNCO02000001.1
ggcttgtagaagctagtacattagagtgaagtcgctctttggttaaggtgagctttagccacatcaaatataaaaaaccctgaatagcttcgctattctagttctgtatttaaaacttgaatgtttcgcgagcgaaacatgaaagttttaaatacttgtgcatagtaatgaaggtagcttctacaagct

SEQ ID NO: 15817 - RNA, 214 nt, Vibrio alginolyticus
  source 1..214: mol_type = other RNA; note = Related to LJTE01000008.1
agcttgcagaagctagtacgttagagtgtagtcgctctcaggttaaggttttcgttaaccacattacttacaattttcgaaaagataaaaattgtaagtaagctgaatagcttcgctattcttaacgcgaacatgaaaatctcgaatattccgcaagcgaaatctacgagtttttcatgttagtgcatagtatagaaggtagtttctgcaagct

SEQ ID NO: 15818 - RNA, 212 nt, Vibrio parahaemolyticus
  source 1..212: mol_type = other RNA; note = Related to AAXXVD010000006.1
agcttgcagaagctagtacgttagagtgtagtcgctctcaggttaaggtttccgttaaccacggtacttacaattttcgaaaagataaaaattgtaagtaacatgaatagcttcgctattctataggaacatgaaaatctcgaatattccgcaagcgaaatctacgagtttttcatgttcgtgcctagtatagaaggtagtttctgcaagct

SEQ ID NO: 15819 - RNA, 219 nt, Buttiauxella gaviniae
  source 1..219: mol_type = other RNA; note = Related to NZ_LXEP01000041.1
agcttgtagaggctagcacaatgggagtcaagttgaccccttggttaaggttacctttaacctcagtactaagttttgcacttcgtttaaaacttagtactatccacataaattcaagaatttatgtggatacaaaatttataaagcaaaatttgcgctaacgcaaattttctttataagattatggatcgcaagtatagagagtagcctctacaagca

SEQ ID NO: 15820 - RNA, 219 nt, Salmonella enterica
  source 1..219: mol_type = other RNA; note = Related to AAMMPP010000001.1
agcttgtagaggctagcacagtgggagtcaagttgaccccttggttaaggttatctttaacctcagtactaagttttgcgctttgcttaaaacttagtactatccacataaattcaagaatttatgtggatacaaaatttataaagcaaaatttgcgctaacgcaaattttctttataagattatggatcgcaagtatagagagtagcctctacaagca

SEQ ID NO: 15821 - RNA, 244 nt, Leclercia adecarboxylata
  source 1..244: mol_type = other RNA; note = Related to WQRG01000008.1
tgcttgtaaaggctagtataaaaggtgtcaagttgaccctaaggttaaggctatctttaacctcagtactaagtttttactttgtaaaaacttagtactactctcacaaattcatgaatttgtgagagtacataaattacaaagcgaaattttgcgctaacgcaaaatttactttgtaatattatggattcgcaagtgtaaaatattaatttaaagatcaaagaaagagtagcctttacaagca

SEQ ID NO: 15822 - RNA, 190 nt, Acinetobacter pittii
  source 1..190: mol_type = other RNA; note = Related to JAKUKP010000004.1
gtctattagggattagtatattgaagtgtagtcgcttcttgtgttcaggggtcattgacctcatacctatataaattttttcaaaatttatataggtatcgatcaagcgttgcttgaatcgattctatcaacaaacccgttggtatttgttgatagaagtagcaagtattttgagtaatctctaataggc

SEQ ID NO: 15823 - RNA, 190 nt, Acinetobacter towneri
  source 1..190: mol_type = other RNA; note = Related to JACXZP010000005.1
acctgttaggggttagtatattgaagtgatgtcgcttctcgtgtttaggggtcattgaccttgtacctatataaattttttcaaaatttatataggtaccgatcaagctttgcttggatcggttctatcaacaaaaccctaggttttttgttgatagaaaagcaagtattttgagtaatccctaataggt

SEQ ID NO: 15824 - RNA, 189 nt, Acinetobacter wuhouensis
  source 1..189: mol_type = other RNA; note = Related to NZ_CP031716.1
acctgttagggattagtatattgaagtgatgtcgcttctcgtgtttagggttcattgaccttgtacctatattaattttttcaaaattaatataggtaccgatcaagctttgcttggctccgtcctatcaacaaaacccttggttttgttgatagaaatagcaagtattttgagtaatccctaataggt

SEQ ID NO: 15825 - RNA, 205 nt, Acinetobacter baumannii
  source 1..205: mol_type = other RNA; note = Related to CP077835.1
tgcctgtaaggattagtattttgaagcgagtcgcttctgacgttaacgggtctttgaccttaactctctattaaatcaaagatttaatagagaggggcgaacagctgctgctgattcgcagtaagaaaagaagatttcttttgattgctatcaaaataaatttcttttcttacaaagcaagtaatttgagtaatccttacaggtt

SEQ ID NO: 15826 - RNA, 206 nt, Acinetobacter sp.
  source 1..206: mol_type = other RNA; note = Related to NZ_VPDZ01000001.1
agcctgtaaggattagtattttgaagcgagtcgcttctaatgttaacgggtctttgacctatactctctattaaatcaaagatttaatagagagggggcgaacagctgctgctgattcgcgtaagaaaataagatttcttttgattgctatcaaaataaacttcttttcttacatagcaagtaatttaaggtaatccttacaggtc

SEQ ID NO: 15827 - RNA, 199 nt, Acinetobacter cumulans
  source 1..199: mol_type = other RNA; note = Related to CP035936.1
cacctgtaaggattagtatgttgaagtgtagtcgcttctagtgttaacgggtctatgacctttactctcattaaatcaaagatttaatgagagggtcgaacagcatttgctgattcgaagtaagaaacaaatttatttggatgtttcccaataaatttgtttcttacaaagcaagtaatttgagtaatccttacaggtt

SEQ ID NO: 15828 - RNA, 209 nt, Acinetobacter chinensis
  source 1..209: mol_type = other RNA; note = Related to NZ_CP032134.1
cgcctatagagattagcaaattgaagtgaagtcgcttctagtgttaaggtctcaatgacctggacttaatctcgaaaatttatcaattttctcgtttaagtcgtgaacagctatcgctgattcacagtgataaacaaaatagcttttgctctacgcaaaatcaattttgtttatcacagagcaagtaaagaaagtaatctctataggtt

SEQ ID NO: 15829 - RNA, 224 nt, Aliidiomarina iranensis
  source 1..224: mol_type = other RNA; note = Related to NZ_PIPJ01000004.1
tggctctcgagcctagttacctgtaaaagagtgcagtcgctctgggcttaaggtcagttttagcctcggtaaaagacgactccttaaaaatgttccatttttaaggagtgctcgcaccgctgcgcggtgactcgctggaaagattatcagtctttccgcgcgagcacggaaagactgataatctttccgcgggagcaaaagtttcgatgtaggatcgagagcca

SEQ ID NO: 15830 - RNA, 204 nt, Belliella kenyensis
  source 1..204: mol_type = other RNA; note = Related to NZ_JAKZGR010000005.1
aggtggaatagaaacaagcattaaggaagcggtgtcgcttccgagaggtaaggctatatttaacctcggtcaaaaatcgcgatttttgacagctcactaggcaaagcctagtttcgctcacaataaacaaagttttattggagcgaactccaataaaactttgtttattgtgagagctgcgaatagaaagttgtttgaccacct

SEQ ID NO: 15831 - RNA, 202 nt, Prevotella sp.
  source 1..202: mol_type = other RNA; note = Related to HF992628.1
ggaaaatagaaactagcatttaggaagtggtgtcgcttccgaaggctaaggttaattttagcctcagtagatagttcagagaactatctacagctcacttggcacagccaagattcgcattcaataaatattattttattgaagcgagctccaataaaataatatttattgacgagctgacgaatagaaagtagttttatcc

SEQ ID NO: 15832 - RNA, 215 nt, Dysgonomonas sp.
  source 1..215: mol_type = other RNA; note = Related to NZ_JAAKEL010000031.1
aggtggaagaaactagcaaataagaagatgtagtcgtcttcgttgataaggtttattttagcctcagtgcatcaatgacccttcagctcattgatgcacagctcacaagacaagcatgtcttgattcgctccaataactaagtagtttattggagtgtccaataaactacttagttattggaacgagctacgagaagaaagtagtaaatccacct

SEQ ID NO: 15833 - RNA, 213 nt, unidentified
  source 1..213: mol_type = other RNA; note = Related to JAIPGO010000099.1; note = Candidatus Cloacimonetes bacterium
aggtggttatattctagtatttatgaagtgtagtcgcttcgatcgttaaggctgattttaacctctgcataataatatcggtagatattattatgcacgctccctttagcagagctaagaatcgctcactcaggcacaagctttgaggagcgacctcctcaaagcttgtgcctgagtgagagctaaagaaaagaaaagtagaataagccacct

SEQ ID NO: 15834 - RNA, 219 nt, Dokdonia sp.
  source 1..219: mol_type = other RNA; note = Related to NC_015496.1
aggtggtatagaaactagcattaaggaagtgtagtcgcttccgaaggttaaggctaattttaaccttgagcataacaaatgaatgaaaaattcatttgttatgctcgcgaactgggcagagcccagattcgcgcacacaaactaatgttttgtgtcgcgaacaacacaaaacattagtttgtgtgaaagctgaagaatagaaagtagttctcaccacct

SEQ ID NO: 15835 - RNA, 209 nt, Chryseobacterium vrystaatense
  source 1..209: mol_type = other RNA; note = Related to NZ_JPRI01000002.1
tggttgaaaaaactagcattaaggaagtgtagtcgcttccgaaggttaaggtgaattttaacctgtgtcataataaaatcaaaaattttattataacagctcactaagcagagcttagattcgctcacacacaaataagttttgtggagcgagcaccacaaaacttatttgtgtgtgaatgcttacgaaaagaaagtagttttccaccc

SEQ ID NO: 15836 - RNA, 213 nt, unidentified
  source 1..213: mol_type = other RNA; note = Related to JAGPCT010000083.1; note = Saprospiraceae bacterium
tgatgggtaagaaacttgcacttagaaggtgtagtcgccttcggccgaattcaggctaaatttagccaatgggctaaagtagaaataactttagcccctgttcgctcagcagagctgaggctcgctccacttaattacctcaaaagtggagcgaactccacttttgaggtaattaagtggattgctaaagcataagaaagaagtcgcccatca

SEQ ID NO: 15837 - RNA, 222 nt, Flagellimonas sp.
  source 1..222: mol_type = other RNA; note = Related to NZ_JACVMN010000002.1
tgatggctaaaagaacttgcatttagaaggtgtagtcgccttcgtgaactaaggctagatttagccattgggaataaaattaaaatcagagattgtttattttattccggttcactcatcaaagatgagattcacgcacttaattaatatttaagtgtagcgtctccacttaaatattaatataagtggaatgctaaagatgaagaaagaagtttgccatca

SEQ ID NO: 15838 - RNA, 196 nt, Nibribacter sp.
  source 1..196: mol_type = other RNA; note = Related to NZ_CP047897.1
aggtggaaaagaaactagcatattggaagcgagtcgcttcttgagttaaggttagatttaacctagggcaaagcaagtttgccagtttgctcggcagggccgagacaaactctcagtaatgatattattcgtcgtatcctccgaataatatcattactgaggttagctaaagtaaagaaagtagttttatccacct

SEQ ID NO: 15839 - RNA, 223 nt, Chryseobacterium sp.
  source 1..223: mol_type = other RNA; note = Related to PCOU01000016.1
aggtatagaagaaactagtacaattgaagtgaagtcgcttcgtaggataaggtacactttatcctttacccttaaatacaaaattagaaattttttatttaagggttctcgctcagcagagctgagactcgcggtgattaatccaaattattttgtagattactccaaaataatcagtattaatcacaaagctaaagttaagaaagtagttaacttattacct

SEQ ID NO: 15840 - RNA, 223 nt, Myroides sp.
  source 1..223: mol_type = other RNA; note = Related to JACHTC010000027.1
ggcacacaagaaactagtacaatcgaagtgaagtcgcttcgtaggataaggtatattttatcctctacctttaaattaaaaatcagagattttgaatttaaaggttctcgctcagcaaagctgagactcgcagtgattaatccatattattttggagaatactccaaaataatccgtcttaatcacatagctaaagttaagaaagtagtaactaattagtgtc

SEQ ID NO: 15841 - RNA, 219 nt, Butyricimonas sp.
  source 1..219: mol_type = other RNA; note = Related to NZ_NFHW01000007.1
acaataaagaaactagcacatttgaagtgaagtcgcttctaaggttaaggtattctttaacctctactcttaataagcaaatcaaagatttgcttattaagagcgttcactcagcacagctgagattcacagtgattaattcagattattctggagcatactccacaataatcggccttaatcacagagcttacgttaagaaagtagtttaattaatgt

SEQ ID NO: 15842 - RNA, 193 nt, unidentified
  source 1..193: mol_type = other RNA; note = Related to JAFWZH010000322.1; note = Clostridia bacterium
agaaactagcaagtaggagtgtagtcgctccgatccgttaagggtttgatttaccccaactgaaaccatccagtattcagcgggcttgaacctatggttcaagctgtcaataattgctaaaatttatggtcgtaaccataaatttaatcaattattgacagggctcacgtaaagaaagtagtttatatcatct

SEQ ID NO: 15843 - RNA, 186 nt, Prevotella copri
  source 1..186: mol_type = other RNA; note = Related to CP042465.1
gaatgttggaaactagaaaataggagtgtagtcgctccggcagggttaggctttgctttacccatcgaacaccacggtgttcgaagtcaaagtctatcgactttgacagcaacagattcatcaaaaatgcgatgcatttttaacgaatctgttgcaggcgttgttaggaaagtagttccagtaata

SEQ ID NO: 15844 - RNA, 243 nt, Sulfurovum sp.
  source 1..243: mol_type = other RNA; note = Related to WTAE01000072.1
agaaaagcattagtacagaaaagagtgtagtcgctcttgattcaggttaattttaaccaccagtaggaaactttatgtcttcactcagtcgctgttcgctcgttcgttcagaaataaagtttcctactgaactccattccattacgtgcaaaactacaagaagacttcttatcgcgtccgataacaagtattcttgtacttttgagatgcgttaccgagaggtaagggtaatgcttttcttct

SEQ ID NO: 15845 - RNA, 193 nt, Aliarcobacter butzleri
  source 1..193: mol_type = other RNA; note = Related to NZ_CABVRY010000015.1
cgatagtgtcagtaagtgtaagtgaagtcgcttaccactgagaggttatttttatcctttggtattaatttttcaaattaatactcggctacggataaatccttcgctcattatataaataaatcttattgattcgttaatcaataagatttattttataatgacagtaatacaagaaaaggtggcactatct

SEQ ID NO: 15846 - RNA, 176 nt, unidentified
  source 1..176: mol_type = other RNA; note = Related to JABMQT010000738.1; note = Lentisphaerae bacterium
ggcttctcgcattagcacgttgaggtgaattcgcctcacaggttaacggtagcgttagctccactggttgtggaacacaaccagtgcttcctcctgacggaggattgcagagatctagctcacatgcatgtgagctagaccccggagttctgctgagtttagtactgcctgaagcg

SEQ ID NO: 15847 - RNA, 191 nt, Sneathiella sp.
  source 1..191: mol_type = other RNA; note = Related to NVRR01000003.1
gtgcgctagaggttagcacaaagaggtgtattcgcctcagggttaaggttcgctttaaccacttcgtagaaacctaagtgggcttctacgaggcttctctaacgagatgcttgccatagtcttaatcgttttggacgatttagctatgacaaggaatgtaaacattgaaaaggaagtagcttttagcgcac

SEQ ID NO: 15848 - RNA, 217 nt, unidentified
  source 1..217: mol_type = other RNA; note = Related to JAGQOP010000117.1; note = Phycisphaerales bacterium
gggtagcaaaatgctagtacaaaggagtgaagtcgctccgcggattaaggttgacgttatcctacgggacaagctgggataaaactccagcttgccccagcgatctcgatattcatcgaggatcgctcgcctaacatgcctgcgcactgcgcgagcgcacctactcagcatgttaggcggtagcgtgcgaagcacggatagaaggtagcggctaccc

SEQ ID NO: 15849 - RNA, 170 nt, Burkholderia cenocepacia
  source 1..170: mol_type = other RNA; note = Related to NZ_CADEUM010000003.1
ggagtgcgcagattagtacgttgaggtgtatcgcctcgctgattgaagctggcgttagccccataatccctgacgggatttcatgtggcgctgactcgccacatgaaagcgtcggccctacgggccgcgttttcggagaaagtagcaggaagggtaatttgcgtgactcc

SEQ ID NO: 15850 - RNA, 163 nt, Bacteroides sp.
  source 1..163: mol_type = other RNA; note = Related to NZ_FQXY01000011.1
tgagggcaaaatttagcacaaaagaggtgtagtcgcctcataagcacaggtattttcctagaaaataaattcttaggtataaataccttaaatttattttagtaaataactcatcctcttctctctttctttatatacatgatacaaaatggacggtatttta

SEQ ID NO: 15851 - RNA, 190 nt, Bacteroides finegoldii
  source 1..190: mol_type = other RNA; note = Related to VWAM01000011.1
tgagggcagaatttagcatcaaagaggtgtagtcgcttcataagcacaggtattttcctagaaaataaattctaaggtataaatacctaaatttattttagtaaataactcatcctctcttctctcttttttatatgcatatacaaaatggacggaattttaataacgatcattgttatcaccgcttttc

SEQ ID NO: 15852 - RNA, 115 nt, Bacteroides faecis
  source 1..115: mol_type = other RNA; note = Related to CP081916.1
ggatgaggaaaaatttagcagaaaagaggtgtagtcgcctcgcaggcacaggtattttcctggaaaataaatctctggtataaatacctctatttattttagtaaaatctcatcc

SEQ ID NO: 15853 - RNA, 117 nt, Bacteroides stercorirosoris
  source 1..117: mol_type = other RNA; note = Related to FQZN01000002.1
ggatgagaaaaatatttagcaggaaagaggtgcagtcgcctcgtaagctcatgggctttcttagaatgtaaatactctggtatgaataccacgatttacattagtaaatactcatcc

SEQ ID NO: 15854 - RNA, 118 nt, Bacteroides cellulosilyticus
  source 1..118: mol_type = other RNA; note = Related to CP072251.1
ggatgagaaaaagatttagcaggaaagaggtgcagtcgcctcgtaagctcaggagctttcttagaaatgtaaatactctggtataaataccacgatttacattagtaaatactcatcc

SEQ ID NO: 15855 - RNA, 113 nt, Bacteroides fragilis
  source 1..113: mol_type = other RNA; note = Related to SZUU01000003.1
ggatgagataaagatttagcaaaaaagaggtgcagtcgcctcgtaaattcagggtttttctgattttctttattatgttgctcataagtaaagaaaagtaaataatctcatcc

SEQ ID NO: 15856 - RNA, 112 nt, Bacteroides fragilis
  source 1..112: mol_type = other RNA; note = Related to CP037440.1
ggatgagataaagatttagcaaaaaagaggtgcagtcgcctcgtgaattcagggtctttctggatttctttattaagatactcataataaagaaaagtaaatactctcatcc

SEQ ID NO: 15857 - RNA, 111 nt, Bacteroides fragilis
  source 1..111: mol_type = other RNA; note = Related to CP036550.1
ggatgagataaagatttagcaaaaaagaggtgcagtcgcctcatgaactcaggttctttctggtttctttattaagatactcataataaagaaaagtaaatactctcatcc

SEQ ID NO: 15858 - RNA, 112 nt, Tannerella forsythia
  source 1..112: mol_type = other RNA; note = Related to RQYS01000018.1
aggtgagcagatattttagcatactgagaggtgtagtcgcctcattagttcaagtgttttcatagaaaagcatatttgtagacaaatatgctttaagtaaaagctctcacct

SEQ ID NO: 15859 - RNA, 148 nt, Dysgonomonas sp.
  source 1..148: mol_type = other RNA; note = Related to JAEPKU010000005.1
ggatgagtaaaagatttagcaagaaagaggtgtagtcgcctcgttagttcatgtattttctgagatttaggaatgttctttattactacctaaatcttacagatttgcaggtgtactaaagaacattcctaaaagtaaacactcatcc

SEQ ID NO: 15860 - RNA, 148 nt, Dysgonomonas gadei
  source 1..148: mol_type = other RNA; note = Related to NZ_GL891979.1
ggatgagtaaaagatttagcaaaaaagaggtgtagtcgcctcgttggttcatgccttttctgagattcagtaatactttgatttattacctgaacctttcagattcttaggtataaatcaaagtattactgaaagtaaacgcccatcc

SEQ ID NO: 15861 - RNA, 149 nt, Apibacter muscae
  source 1..149: mol_type = other RNA; note = Related to SELI01000017.1
ggatgagttaaaatttagcaagaaagaggtgtagtcgcctcgttggttcatgcctttttctgagattcagtaataacttcgatttattacctgaacctttcagattcttaggtataaatccaagtattactgaaagtaaacgctcatcc

SEQ ID NO: 15862 - RNA, 150 nt, Dysgonomonas sp.
  source 1..150: mol_type = other RNA; note = Related to NZ_OEPV01000016.1
ggatgagttgaaaatttagcaagaaagaggtgtagtcgcctcgttggttcatgcctttttctgagattctgtaataccttgattgtattacctgaatccttcagattcttaggtataaatcaaggtgttacagaaagtaaatactcatcc

SEQ ID NO: 15863 - RNA, 149 nt, Dysgonomonas hofstadii
  source 1..149: mol_type = other RNA; note = Related to NZ_JACIEP010000005.1
ggatgagctaaagatttagcaagaaagaggtgtagtcgcctcgatagttcatgccttttctgagatttaggattgttctgtattactgcctaaatctttcagatttacaggcggtactacagaacaatcctaaaagtaaacacttgtcc

SEQ ID NO: 15864 - RNA, 149 nt, Dysgonomonas sp.
  source 1..149: mol_type = other RNA; note = Related to JACMIC010000003.1
ggatgagataaagatttagcaagaaagaggtgtagtcgcctcattgattcatgcctattctgagattcagtaatactttgattttattacctgaacctttcagattcatggtataaaatcaaagtattactgaaagtaaatgctcatcc

SEQ ID NO: 15865 - RNA, 144 nt, Dysgonomonas sp.
  source 1..144: mol_type = other RNA; note = Related to QVMQ01000008.1
gggtataaagatttagcaagaaaggggtgcattcgccccgcaaaatcatgtattttccgagatttagataaatgcctaaagctaatattctaaatcctccggaatttattcatgctttaggcatttatctaaaagtaaactccc

SEQ ID NO: 15866 - RNA, 149 nt, Dysgonomonas sp.
  source 1..149: mol_type = other RNA; note = Related to QVMN01000003.1
ggatgagctaaagatttagcaaaagaagaggtgtattcgcctcatacactcatgttctttctggggatttaggcgtaattgtatgttatgtgctaaatcttacagattatagataacatacaattatgcctaatagtaaacactcatcc

SEQ ID NO: 15867 - RNA, 215 nt, Prevotella sp.
  source 1..215: mol_type = other RNA; note = Related to JAFPFX010000010.1
gtgcaatgaacttcagcattgtagagatgaagtcgtctcccaaactaacagttgttttaccctttattatgcgcaaggcataataaagattacctctaggctttcgtgtctccttcgccactgaaaggcgaagtgtcgccttcccgcgtctcgtgtccccaaaagcctagaggtgattattgctctgtcttacgcttaagtgaagttcattgcac

SEQ ID NO: 15868 - RNA, 134 nt, Apibacter raozihei
  source 1..134: mol_type = other RNA; note = Related to NZ_CP034930.1
tgagaatcaaaatttagcattagaggtgtattcgcctcgtttactgaggatatttagtagcaagtaaaaaagatacaaagtatctttatacttagttaagtattgataaacatatacttaagtaaatattctca

SEQ ID NO: 15869 - RNA, 190 nt, Emticicia sp.
  source 1..190: mol_type = other RNA; note = Related to PKRS01000005.1
agatggggaaattagcatcacttggaggtgtaatcgcctcttgattaaatgcctacgttagccgttccctgtaactttagttacagggaagcagtttttcaaactgcttgtctaaatttatgctaaatttagacaacgaataaattgagttgtatcacattcaaaatacaaaaagtaattttcccattct

SEQ ID NO: 15870 - RNA, 170 nt, Elizabethkingia miricola
  source 1..170: mol_type = other RNA; note = Related to QNTX01000003.1
agagtgaaagatttagcagattggaggtgaattcgcctcaggcatttaagttaattttaaaactacttaataaaactcattaagtaagttcttagcagaacttacctactaaattttactaacgtaaatttagtaaatagaataatacaatgaaagtaaatactcatcct

SEQ ID NO: 15871 - RNA, 168 nt, Chryseobacterium sp.
  source 1..168: mol_type = other RNA; note = Related to MAUH01000030.1
aggtgaataaaattttagcagattggaggtgtagtcgcctcaggcttaaacggtagtttaatctacattagtaaactaataagttcttaacagaacttgttactaaatattactttggtaaatttagtaatgagaattacattacatagaaagtaaataaaaacacct

SEQ ID NO: 15872 - RNA, 169 nt, Sphingobacterium sp.
  source 1..169: mol_type = other RNA; note = Related to JADEYP010000027.1
agggcagaaaaattagcaatacagagtttagatgtcgactcttttgattaggctgtaattagcctaacataaattatctgaaaagagaatttatgttggtaccttaacaggataccagttctattattagtaatagaactaagataaatatatagaaagtaattgccct

SEQ ID NO: 15873 - RNA, 177 nt, Odoribacter sp.
  source 1..177: mol_type = other RNA; note = Related to QUMF01000012.1
ggatggagaatgaaactagcacgtcgaggtgcattcgcctctttgattaacgctattgttagccaaggtagtataacgggtactatcttagttcctaacggaactaagatactaaattctactaacgtagaagtttagtatcgagaataaatttcaatgaaagtagtttctccatcc

SEQ ID NO: 15874 - RNA, 178 nt, Xanthomarina gelatinilytica
  source 1..178: mol_type = other RNA; note = Related to NZ_ANLA01000010.1
ggatggggaatgaaactagcacgttggaggtgtattcgcctcttagattaacgctggcgttaaccatactagtgccttaaaaggcactagtatagttcctaacggaactatactactaaatctacttcgtagtatttagcagttagaataaattacaatgaaagtagttttcccatcc

SEQ ID NO: 15875 - RNA, 177 nt, Pseudomonas fluorescens
  source 1..177: mol_type = other RNA; note = Related to LCYB01000004.1
tggggtcggctctagtaatcgaaggtgtatccgcctttatcattcaggctgattttagccacgaatgaattcaactctatcgctccactcgcttcgctcgctcctcgatagagttaaatccattcactacgtgaatgaatttaagtgaaaagagcaagctggtagggtcggccttca

SEQ ID NO: 15876 - RNA, 161 nt, Pseudomonas chlororaphis
  source 1..161: mol_type = other RNA; note = Related to CP027736.1
tggggtcggctctagtaatcgaaggtgtatccgcctttatcattcaggctggttttagccactgaatgaattcaactctattgcttcgcaatagagttaaatccattcactgacgtgaatgaatttaagtgaaaagagcaagctggtagggccgaccttca

SEQ ID NO: 15877 - RNA, 161 nt, Pseudomonas aeruginosa
  source 1..161: mol_type = other RNA; note = Related to NZ_QDGR01000012.1
tggggtcggctctagcaatcgaaggtgcatccgcctttatcattcaggctgcttttagccactgactgcgttgaactcaagcgcttcgcgctcaagttaaacgcattcactgacgtgaatgagtttatgtgaaaagagcaagttggtagggccggccttca

SEQ ID NO: 15878 - RNA, 156 nt, Pseudomonas sp.
  source 1..156: mol_type = other RNA; note = Related to NZ_CP067098.1
agggggtcggctctagcaatcgaaggtgttttcgccttcatcgttcaggctggttttagccactgaatgaaataaactctgctgcgcagagtgcatttcattcactgacgtgaatgaaatatcgtgataaaagcaagctcgtagagtcgatcccct

SEQ ID NO: 15879 - RNA, 162 nt, Pseudomonas promysalinigenes
  source 1..162: mol_type = other RNA; note = Related to NZ_CP077094.1
tgggtccggctctagcaatataaggtgtagtcgcctttatcgttcaggctggttttagccactgaatgaattcaactctaccgctagcgcggcagagtctaatccattcactgacgtgaatgaattagagtgaaaacagcaagctagtagagtcgggcctca

SEQ ID NO: 15880 - RNA, 164 nt, Achromobacter xylosoxidans
  source 1..164: mol_type = other RNA; note = Related to CYTI01000008.1
cgtgtttgagcgttagcaatcgggggtgcattcgccctcattcggtaaggctgcttttagccactgaacagaaaaactcttcttcctacggaagaagagttctttccattcactgacgtgaatagaaagaagtgataaataatggttagtaacactcaaatgcg

SEQ ID NO: 15881 - RNA, 161 nt, Burkholderia seminalis
  source 1..161: mol_type = other RNA; note = Related to JAIZSD010000010.1
cgggcttgagcgctagcaatcggaggtgcattcgcctctatcgataaggctgcttttagccactaaatgtataaaactctgcttcttcgaagcagagtttcatccattcactgacgttcctggatgaagtgaaaacgcatggtacgtagcgctcaggctcg

SEQ ID NO: 15882 - RNA, 165 nt, Massilia rivuli
  source 1..165: mol_type = other RNA; note = Related to NZ_WKJJ01000010.1
cggcttgagcattagcaatctgaggtgttatcgcctctctcgttaaggctgcttttagccactgaatggatcatactctgcttcgacaagtcgaagcagagtacaattcattcactgacgtgaataaattgtgtgaaaaagtacggttcgtaatgctcaagctcg

SEQ ID NO: 15883 - RNA, 158 nt, Cupriavidus necator
  source 1..158: mol_type = other RNA; note = Related to NZ_CAIGKG010000003.1
gggttttcagcgttagcaatcgaaggtgtcatcgccttcatcgtttaggctggttttagccactaaatgaatttactctgcttctgcgaagcagagtaaatccattcactgacgtgaatgtatttccgtgaaaactgcaggctcgtaacgctgaatcc

SEQ ID NO: 15884 - RNA, 169 nt, Azonexus fungiphilus
  source 1..169: mol_type = other RNA; note = Related to NZ_RBXP01000016.1
tggagtctagtgttagcaatcgaaggtgttatcgcctttatcattcaggccgcttttagccactgaatgaatgctgactctgattctgcaagcagaatcagagtcacaattcattcactgacgtgaatgaattatcgtgaaaaatgacagttagtaacactagattcca

SEQ ID NO: 15885 - RNA, 179 nt, Colwellia sp.
  source 1..179: mol_type = other RNA; note = Related to CP014943.1
tgaggttttgctctagcaatataaggtgtattcgcctttttcgattaggggttgtttaaccactaataggtctgatcacttaagaacgaataaaagacactattcgctcttaagtgatgagaattatcactacgtgacaatgtctcaaagtgaaaattttatagtagagcaggacctca

SEQ ID NO: 15886 - RNA, 188 nt, Photobacterium andalusiense
  source 1..188: mol_type = other RNA; note = Related to NZ_FYAJ01000004.1
tgccttctagttctagcaatataaggtgtattcgcctttttcggttaggttaactttaacctaatcgaattataagagcctgcaccaagattcgaacggtggagctttgttcgaatcttggtgcacataacttccactacgtgtaaggttatgtattagaaaaagatagaaagtagaactagaaggca

SEQ ID NO: 15887 - RNA, 175 nt, Aeromonas hydrophila
  source 1..175: mol_type = other RNA; note = Related to NZ_CP028568.2
atgtgagaggggctagcattttgaggtgtcatcgcctctattgctcaggttaattttagccatcgagcaagtctaaactatgcacgcatcgaaaagactgatgcgcgcatagttcaaaattgatcactgacgtgatctattttggatgaaaatacagtaggtagcccctctccat

SEQ ID NO: 15888 - RNA, 172 nt, Aeromonas media
  source 1..172: mol_type = other RNA; note = Related to NZ_JRBG01000001.1
tagcgagaggggctagcaatatgaggtgttatcgcctctatcgttcaggctatttttagccactgaacaaaccactgcacgcacatcgaaaagatgatgcgcgtgcagtgaagtttgttaactgtcgttaacaaacttcgagtgaaatatcagttagtagcccctctcactt

SEQ ID NO: 15889 - RNA, 176 nt, Mesorhizobium sp.
  source 1..176: mol_type = other RNA; note = Related to JAIUIU010000040.1
tggccgccccggttaggacgatgaggtgttacgcctcgggactaaaggtgtctttatcatctctgcgagggctaacgcccatcgctaatgagccctaacaggctcattgccatgtcgctaacgcgcatggatgaaatacaaatatgtataatgatgaatagtaatcgaggcggtca

SEQ ID NO: 15890 - RNA, 173 nt, Oricola cellulosilytica
  source 1..173: mol_type = other RNA; note = Related to SJST01000002.1
atgcctcgctcgatagcacttaggggtgcactcgcccctcagtctcacgggggatttagcactttggacctgctacaatcaggtcccacagggctacgcccttgtgtcgggaaaccgcaaagcggttgtcccaaaaagaagatgaactttcttgattgtatcgggcggggcag

SEQ ID NO: 15891 - RNA, 174 nt, unidentified
  source 1..174: mol_type = other RNA; note = Related to JAEPPB010000039.1; note = Pseudomonadales bacterium
agggggctcccaatagtattaggagatgttttcgtctccatttcgataaggctagctttagcggacacactggcgtgtaaacacgccagtaacctggaaaacggttagtattttgtgtcattaacatgacttttattactgtgtcataaaagaagaaagtattgggagtcccct

SEQ ID NO: 15892 - RNA, 171 nt, Klebsiella variicola
  source 1..171: mol_type = other RNA; note = Related to NZ_CAKLOR010000001.1
tggctgcatacgctagattatgaaggtgaattcgccttttatgcttaggctacctttaacctgttaatggttaaaggccactacaacgttcttcgaacgttgtagtgaacattaatcattaacatgattaatgttgagcagaaacaaaaccgttagtagcgtatgcagtct

SEQ ID NO: 15893 - RNA, 107 nt, Rahnella sp.
  source 1..107: mol_type = other RNA; note = Related to SLYT01000019.1
tgctgtccagctctagtttaataggtgtatcgcctatggatgctaaggttttctttaacctcacgagttctgcattttttcttttgattcggtagtgctggacagca

SEQ ID NO: 15894 - RNA, 104 nt, Shewanella halifaxensis
  source 1..104: mol_type = other RNA; note = Related to NC_010334.1
ggctatccagcgttagttagtataggtgaatcgcctatcttgttgaggtcctttttaacctcatcaattctattacaagctccggttcgtggcgttgggtagcc

SEQ ID NO: 15895 - RNA, 101 nt, Vibrio breoganii
  source 1..101: mol_type = other RNA; note = Related to NZ_MCYY01000073.1
ggctatccagcgttagctagtataggtgaatcgcctatcatgtgaggttctttttaacctcataaattctattggccggcatattgttgcgctgggtagcc

SEQ ID NO: 15896 - RNA, 109 nt, Aeromonas veronii
  source 1..109: mol_type = other RNA; note = Related to JH823256.1
ggctgctcactgctagtgagtataggtgtatcgcctatcattatgttgaggtttattttaacctcattacattctaaaaagacgttgttgttcgtggcggtgagtagcc

SEQ ID NO: 15897 - RNA, 160 nt, Vibrio sp.
  source 1..160: mol_type = other RNA; note = Related to NZ_LNRB01000009.1
tggagctaagctcccatgggtgattcgcctatgtcgttaagggtttttttaacctcactacgttctattaaatatttaaaagactttcgtgatactgagtagctacctacttcttggagcaagatttgagtccagaatacaaaaagtggtttgagttcct

SEQ ID NO: 15898 - RNA, 174 nt, Mangrovimonas sp.
  source 1..174: mol_type = other RNA; note = Related to JAAFZY010000006.1
ggagggaaaggattagaagatggagtgtagtcgctccagtaaagcttaggctgttttaaccattgtgatgatttgttagaactgaaacatgcaagggcagtttcagcgataataattcatctcaaatcgaatggaaaagatttatttcgaattattatgtaatcctttctctct

SEQ ID NO: 15899 - RNA, 183 nt, Tenacibaculum sp.
  source 1..183: mol_type = other RNA; note = Related to FNSF01000001.1
tgagagagaggattagaaaataaggcgtagtcgccttagtaaggctcaggctgttttatccattgaaatgatttgttagcactgaaaatatttcgatatatttccagagataataaaacatctcaacatttgataaagtttcgagttttattgctttaaggattgtcgtaatcctctcttttt

SEQ ID NO: 15900 - RNA, 174 nt, Psychroflexus sp.
  source 1..174: mol_type = other RNA; note = Related to JAIQZE010000004.1
agagaagaggaattagaaaatgaggcgatgtcgcctcagtacagttaaggctgttttatccattataatgatttgttagaactgaaatcagaaaattgattccagttacaataattcattatttgtaaagaatggatttctattttatgaattattgtgtaattcttcttctct

SEQ ID NO: 15901 - RNA, 178 nt, Nonlabens ulvanivorans
  source 1..178: mol_type = other RNA; note = Related to BBMM01000006.1
gaaaagggagaattagaagatggagtgtaggcactccagtgcggcttaggctgttttatccatttgatgcattgctacaactgaaatcaagaaaaatgattccagttataaaaattcttcaatagtaatattgaagtatttagttttatatcgaatttttacgtaattctcccatttt

SEQ ID NO: 15902 - RNA, 178 nt, Mucilaginibacter sp.
  source 1..178: mol_type = other RNA; note = Related to JAHXPQ010000003.1
aagagaatagtactagcgtttataagtcgtagcgacttttttaataaggctgatttaaacctcagtttttgtaccaaaaacaaatattctaacgaatattatttgaatgattcattccattgtatttcattcacattcaattagaattaatttcaatgatgtgtagtactattccttt

SEQ ID NO: 15903 - RNA, 168 nt, unidentified
  source 1..168: mol_type = other RNA; note = Related to JAGQWR010000133.1; note = Saprospiraceae bacterium
agaggagtaggtactagcaactttgaggcgatgtacgcctttatgattgacgctggcgttagccacggggtagcattttaactaatgctaccaattcttcgaattgaaaatcaccggagttgattttatcagaatctatgattaatagaatagtagtacctctcctct

SEQ ID NO: 15904 - RNA, 193 nt, unidentified
  source 1..193: mol_type = other RNA; note = Related to JAGNNE010000423.1; note = Leptospiraceae bacterium
agcttgtagctagttgtatgagatgttatcgtctcagggatttaggccgagtttagcccattttgtggttgcataaaagaactgatttttatgcaaccacaaatgctcctcggtagctgcatttgcatagttgctgcattaacatgcaataatatgcaaatgaagttcctttcagagaaggtagctacaagct

SEQ ID NO: 15905 - RNA, 236 nt, Ahniella affigens
  source 1..236: mol_type = other RNA; note = Related to CP027860.1
cgaagtcggaaagctagacgttggagtgtcatcgctccctatgctgaggcgagcaatcgtctcagtcgacgtaccgggaaatcatcagtacgtcgactgcaaccagtttgtcaaaccttcggtttgccaacctggctgcaacaaagaagttcgctgtcaagcgtcccgcttgccatcgaacttctttgctgtgcgtgctttgcagcacgtaatagtattaagtagcaccggcttcg

SEQ ID NO: 15906 - RNA, 225 nt, Stenotrophomonas maltophilia
  source 1..225: mol_type = other RNA; note = Related to JAFIXE010000059.1
ggcctggtcgcgcattagaagatggagtgtagtcgctctgtgtattgaggccattttcggcctcgctactgacgattttaacaaatcgtcagtatcaggcgccccttcgggtcgcctcagcgcgtagtcagcctgaccgtgcgcattcgcacgctcaggctgcctacacgccgagcgatagtacaaatgtactatcgtaaaagtgaagtaatgtgccggccggcc

SEQ ID NO: 15907 - RNA, 229 nt, Sulfitobacter pontiacus
  source 1..229: mol_type = other RNA; note = Related to NZ_FNNB01000012.1
gagtggtcaccgctagcgtttagaagtgtagtcgcttctacggttaaggtgggcgaaagccttacagtaacatttcttgagtttctcaagaaagtgttactgtgcctccttgcgtcggcaggcccgaaatacgatgaaatttcaattttcaatgctgaaaatggaaattcatcgaatttcaggcgtaagcgatgcgagcatcgaagagatctggtagcggtggccacgc

SEQ ID NO: 15908 - RNA, 237 nt, Brucella anthropi
  source 1..237: mol_type = other RNA; note = Related to NZ_CP044970.1
gagtggtcgcagttagcgcacggaagtgtaatcgcttctgcggttaaggctcacgatagccttgtggacactcgattttttgagtctctcaaaaaagtcgagcgtccaatgtctcctcatccgagggacagacacgtgaaccacagaaaccttcgtttttattcaaaaacaaaggttctgcgcttcacgtgtctaagcgatgtaaacatcggaatgatctggtagcggcgaccactc

SEQ ID NO: 15909 - RNA, 236 nt, Rhizobium skierniewicense
  source 1..236: mol_type = other RNA; note = Related to JACIDV010000004.1
gaatggttgtcattagcgcaaagaagtggattcgcttctgcggttgaggttcgcgatagcctatcgactactcgatttttagagtgttctaaaaagtcgagtagtcgaaatgcgctctccgagcgcatcggcacgattgtcgcagaaactcgaattttcttagaaaatccgagttctgcgtcactcctgccgcagcgatgccttgcatcgaaatgattacgtaatggcaaccattc

SEQ ID NO: 15910 - RNA, 230 nt, Methylobacterium sp.
  source 1..230: mol_type = other RNA; note = Related to NZ_BACT01000550.1
aggcggccgacgttagcgtttaggagtgtagtcgctcctacgggtaaggctggcgtaagccatcgccggggttcgatttggcgtcccgccaaagtcgccccccggtgtgtcaccctatcgggtgaccagcaatacagccaaaaaggccctgtgagactactcacagcgccttttgtctgcattgctgatgcgttgctcgcaacggattgatcaagtaacgtcggccgcct

SEQ ID NO: 15911 - RNA, 227 nt, Marimonas lutisalis
  source 1..227: mol_type = other RNA; note = Related to NZ_SKCI01000005.1
ggctggcgctcggctagtgtttcgaagcgaagtcgcttcggcagctaaggctgagtttaacctccagcagggagattcgaactcgttccgacttcgcatctccctgcgggcagcgggttcatcttctttgaatctgaatccgcgccataacgacatcttgcagtcgcaagatgtcgttatggagcgtcttccagacggaagtgggaagtagtagtcgtgcgccggcc

SEQ ID NO: 15912 - RNA, 152 nt, Asticcacaulis biprosthecum
  source 1..152: mol_type = other RNA; note = Related to NZ_GL883080.1
gggtggcgatagcactttgaggcgatctcgcctcgttggctaaggccaagtttatgcacaggtcaggacacgtcctgacctacgccccggtggggcgtagtatgccataaaggcatgttgtgaacgatgttgatgagaaggtatcgccaccc

SEQ ID NO: 15913 - RNA, 163 nt, Rhizobium leguminosarum
  source 1..163: mol_type = other RNA; note = Related to JAAXEP010000005.1
aggcgggtggtgatagcacggtgaggcgacttcgcctcgttggctaaggccaggtttatgcactgggcaagactgcgctttgccctacgtccctgcggggacgaaacgatgccataaaggcatcgagtgaactacgttaatttgaaggtatcaccacccatca

SEQ ID NO: 15914 - RNA, 155 nt, Sphingomonas sp.
  source 1..155: mol_type = other RNA; note = Related to NZ_CAKLBS010000005.1
gggtggcgatagcacgttgaggcgacctcgcctcgttggctaaggccagatttatgcacagggccttcttgcagaaggccctcgcaccctgcgggatgcgtgcgatgccataaaggcatcgagtgaactttgttgatttgaaggtatcgccaccc

SEQ ID NO: 15915 - RNA, 184 nt, Qipengyuania flava
  source 1..184: mol_type = other RNA; note = Related to NZ_CP022528.1
gttagggcggcgatagtgtccagaggcggtttcgcctcgtttagttaggcttcgtttatgcatacattctccgcgcgaggcttacccgtcgcggagatcgtatccacacttcgtgaggatacgaagtcatacgcgagctagacttcatatgaacgtgttgatgcgaaggtatcgccgccctaat

SEQ ID NO: 15916 - RNA, 204 nt, Roseomonas sp.
  source 1..204: mol_type = other RNA; note = Related to JAJTGN010000370.1
gggtcagctcgatagcataaagaggcgtagtcgcctctgtggtttaggctgacgttagacttgcgtaatgcacattcgtgcattacttatgcatctcaatcgatgcatatgcatctcaatcgatgcataaaatgcaaaattttgcaaaccgcaaaatttgcattgagggatggcttcgtagaaggtaaagtatcgttctgatcc

SEQ ID NO: 15917 - RNA, 165 nt, Sphingomonas sp.
  source 1..165: mol_type = other RNA; note = Related to NZ_JROG01000004.1
gcgatggtgcggttagacttagaggtgggttcgcctcggttgctaagggttccgttagatgctcggcgatcattcgatcaccgatgagcacctacggcgctcatagaactacataatatagtagttctagcaaattatcatgacggatagtatccgcaccatcgc

SEQ ID NO: 15918 - RNA, 165 nt, Gluconobacter kondonii
  source 1..165: mol_type = other RNA; note = Related to NZ_BEWP01000006.1
gcgatggtgtggttagacaaagaggcgggttcgcctcggttgcaaagggcttcgttaggcgctcggtaatcgttcgattaccgaaacgcgctttcagcgctcttagaactacatataatagtagttctagcaaatctctatgatcgatagtatccgcaccatcgc

SEQ ID NO: 15919 - RNA, 173 nt, Qipengyuania aquimaris
  source 1..173: mol_type = other RNA; note = Related to JAHVKP010000001.1
agcggctcatcggttagacatagaggcggcttcgcctcggttattaacggttccgttagatactaggctttccttcgcaaagcctatgagcactttcagtgctcatgaaattacatatataaatatagtaaatttcagttaattatatgactgatagtatccgatcagccgct

SEQ ID NO: 15920 - RNA, 176 nt, Acidimangrovimonas sediminis
  source 1..176: mol_type = other RNA; note = Related to NZ_PHSN01000004.1
gggcgggcatggatagaacttagaggcgcattcgcctcggttgttcaggctgactttaaggcagcctccctcaagagggaggctgttgttcctgcggaacaacacggtgcccatgaagggcaccatgcagatatcatattttagatatgatataaattattaggtatcctccgtcc

SEQ ID NO: 15921 - RNA, 172 nt, Rhizobium leguminosarum
  source 1..172: mol_type = other RNA; note = Related to SJNG01000007.1
cggggcgcagcgatagttcttgggggtagattcgcccctgcaagcttaggagcgcgttaaattttcttcacgcacttcgcgcaagaagcatagatcctttggatctatgtttactgcataaagcagtaacgaagaatatatactatattcactctggtatcgttgcgctcca

SEQ ID NO: 15922 - RNA, 128 nt, Pseudovibrio sp.
  source 1..128: mol_type = other RNA; note = Related to LMCG01000027.1
agcaggatctgcgatagtatgtggcgcagtcgccacatcaactcaggggcccgttaacgttcctataaattaattttataggaatttggtttttgatatgattatttatggtatcgcagtttcctgct

SEQ ID NO: 15923 - RNA, 178 nt, Mesorhizobium sp.
  source 1..178: mol_type = other RNA; note = Related to VFTI01000007.1
ggcatcaaggaactagcgcaacgaggtgaattcgcctcggcgacttaggctagagttaagcccattcggtaatcgaagaagattaccgagaggttctacgaacctcagacaactaacattgttatttgtcgatgaagcagtcgaaatataaatctgtattatgtggtgacttggtgcc

SEQ ID NO: 15924 - RNA, 177 nt, Mesorhizobium sp.
  source 1..177: mol_type = other RNA; note = Related to NZ_AYXE01000006.1
ggcatcgggaagccagcgcaacgaggtgcaatcgcctcggcgacttaggctaaggttaggcccattcggcaatcgaagagattaccgagaggttctacgaacctcagacaagtaacatggttatttgtcgatgaattagttgattggtacaatcatattatgtggtaacccggtgcc

SEQ ID NO: 15925 - RNA, 172 nt, Roseovarius sp.
  source 1..172: mol_type = other RNA; note = Related to LR701476.1
tgaaggctcggcgatagtaacgggaggtgtatccgcctccgtcttgttaaggtgtgcgttagattatcttcacgcgccttgcgcaagaagcatgggatctaaagatcccatgttactgcataaagcagtaatgatatcatgaagtatgatttctttgtatcgctgaccttct

SEQ ID NO: 15926 - RNA, 214 nt, unidentified
  source 1..214: mol_type = other RNA; note = Related to DXFG01000149.1; note = Candidatus Blautia pullistercoris
agaccggggacagcatatgcagaaaattttcttgcaggaaatgttctgcggcagaagcgagtcgcttttgctttgatcttttccgggtatgatggcacagccagcccttcatcagctcttgtgtacatccgcacacttcatgtgcataaataagccttcggcttattggtacacagccgctgcttacggtatcaccattttgtgttcccggtcc

SEQ ID NO: 15927 - RNA, 218 nt, unidentified
  source 1..218: mol_type = other RNA; note = Related to DWUX01000243.1; note = Candidatus Blautia stercoripullorum
agactggggacagcatacgcagaaaatattctcccttacaagatgatttctgcggcagaagcgagtcgcttttgctttaatcttttccgggtattatggcacagccagcccttcatcagctcttgtgtacatccgcacacttcatgtgcataaataagccttcggcttattggtacacagccgctgcttacagtatcaccatttcgtgtccccggtcc

SEQ ID NO: 15928 - RNA, 193 nt, unidentified
  source 1..193: mol_type = other RNA; note = Related to DXBG01000050.1; note = Candidatus Blautia pullicola
tttcgggaaacagcttacgcagattttctgcccccaaggcgagtcgcctccgggtatttattccagggttttctggctctgccagcccttcatcagctcttgtgtacaaccgcacatttcatgtgcctgccaagccttcggcttgtggtacacagccgctgcttacggtatcaccattttgtgtttcccgaac

SEQ ID NO: 15929 - RNA, 189 nt, unidentified
  source 1..189: mol_type = other RNA; note = Related to JAGZGI010000008.1; note = Lachnospiraceae bacterium
tcacagcagacagaggagacagttttctgtcagagaagcgagtcgcttttctattttttattccgaaaggtatggctgcgccagccctccttcggctccgaggtacatctgcacactgcatgtgctttctcgcctgcggcgccgtacctcttcgccgaatccggtatcaccatttagtgtctgctgtgt

SEQ ID NO: 15930 - RNA, 189 nt, Blautia argi
  source 1..189: mol_type = other RNA; note = Related to NZ_CP030280.1
acacagcagacagcgaggacagatttctgtcagagaagcgagtcgcttttctattttttcaataaaaggaatggctttgccagcccttctttggcttcgaggtacatctgcacatttcatgtgctttgcccgcctgcggcgcagtacctcttcgccaaatccggtatcaccattttgtgtctgctgtgt

SEQ ID NO: 15931 - RNA, 192 nt, Blautia hansenii
  source 1..192: mol_type = other RNA; note = Related to CP022413.2
acgcagcagacagcgaagacaacgaaaaacttcatgtcagaaaagcgagtcgcttttctatgttataaattaagcgatggcttatgccagctctgcattggctacgccgtacatcggcacatttcatgtgcttttgcctgcggcttgtacggcttcgccaatttctttatcaccattttgtgtctgctgtgt

SEQ ID NO: 15932 - RNA, 198 nt, unidentified
  source 1..198: mol_type = other RNA; note = Related to DVGS01000147.1; note = Candidatus Egerieimonas faecigallinarum
cgcagaaggacagcgttcacaggttgtttctgtgggggaagcgagtcgctttcctgaatttcttttccggcgggacggcttcgcccgccctgcgtcagctccgatgtaccgcgggcatggagatgcccgcgtccagccttccagctggttctgcacatctgcgctgtctccggtatcatctctttgtgtccttctgcg

SEQ ID NO: 15933 - RNA, 194 nt, unidentified
  source 1..194: mol_type = other RNA; note = Related to DXGZ01000117.1; note = Candidatus Mediterraneibacter vanvlietii
agaccggggacagcgcatgtgaaatctgtttcaccggggaagcgagtcgctttcctgattctctgatctgcaggtacggcgtggccgtcccttacaccgctcctgtgtacttctgcacactgcgtgtgctttcgtgcctgcggcacgcgtacacatccgcgggatgcggtatcatcattttgtgtccccggttt

SEQ ID NO: 15934 - RNA, 195 nt, unidentified
  source 1..195: mol_type = other RNA; note = Related to DXEY01000047.1; note = Candidatus Mediterraneibacter colneyensis
ataccggggacagcggtatgcggaacggttccgcacagggaagcgagtcgctttcctgctattttctgttgcgttatgatggcacagccatccctccatctgctccgatgtactaccgcacacggcgtgtgcatgtgccttcggcacgggtacacctccgcagattacggtatcaccatatagtgtccccggtaa

SEQ ID NO: 15935 - RNA, 199 nt, unidentified
  source 1..199: mol_type = other RNA; note = Related to NFKT01000023.1; note = Proposed Lachnoclostridium sp.
ataccgggaacagcttactgcagaaaccagacttttccgcagggggaggcgagtcgccttcctgttatttttatccggtgaaacggcactgccgtccctccgccgctcctgtgtactactgcacacttccatgtgcatgcgcctgcggcgccggtacacatccgcggattacggtatcaccatattgtgttcccggttt

SEQ ID NO: 15936 - RNA, 219 nt, Ruminococcus sp.
  source 1..219: mol_type = other RNA; note = Related to JAJEQX010000005.1
agaccggggacagcgaagcgcggatactgagcgacgccagtacagaacgcgcaggggaagcgagtcgctttcccttctgacatttacccgggtgatcatggctctgccatccctgcacccgcttctgtgtactgctgcacactttcatgtgcctggccgtgcctgcggcactggtacacatacgcgggttccggtatcaccatatcgtgtccccggttc

SEQ ID NO: 15937 - RNA, 210 nt, unidentified
  source 1..210: mol_type = other RNA; note = Related to JAGTTS010000004.1; note = Clostridiaceae bacterium Marseille-Q3526
cggcagacggcagcgaaaaagcgtttcatacaggctttttggaagagcgagtcgctcttcctgtggataaaaagaggacaggcagcttcgcagccttccgaatctccttcgccgtacatggtttccggtttccggaaactcctatcctcttcgaggatatggggtacggctttggaagaaccggcattgccgttttagtgctgtctgccg

SEQ ID NO: 15938 - RNA, 210 nt, Clostridium sp.
  source 1..210: mol_type = other RNA; note = Related to NZ_CP085988.1
aggcgcgcggcagcgaatggaacataagggttcccaaaggagcgagtcgctctttttgtcagaagggaggggcaggcagcgctgtctgccttccaaatcatctgcaccgtacagggagcgcccatgcggtgcatgaacgccggtatcccctgcggggatattcagtacggctccgaagattcggcattgctgtgacagtgccgcccgcct

SEQ ID NO: 15939 - RNA, 252 nt, unidentified
  source 1..252: mol_type = other RNA; note = Related to JAGZWN010000002.1; note = Clostridiales bacterium
ccccggacagcggaaagcgggaaatggacggaacgccctcttcgggggcggctcctgaaaaaactgcgggaaatgcgagtcgcatttctgagaaagaagaaagcaccggcagacacggtctgcatgacaatggaacttccttccattgtcataaaaaacggctgcagcgtacgactgcacaccttgcggtgtgccaggccgccgtcggctggcacgcctccgccgttttgtatcacagtattgtgtccggga

SEQ ID NO: 15940 - RNA, 185 nt, unidentified
  source 1..185: mol_type = other RNA; note = Related to HF995414.1; note = Firmicutes bacterium CAG:646
tgaaacaggatagcgtaagcagagagatctgcggggaaaacgagtcgttttcctgaaagagtaggagagataaccggctttgccggccggaattacgccaaggtacgactgcacactagggtgtgcttacagccttcggctttgtacctttctgtaattccctatcacgatttagtatcctgtca

SEQ ID NO: 15941 - RNA, 195 nt, unidentified
  source 1..195: mol_type = other RNA; note = Related to DXHY01000007.1; note = Candidatus Eisenbergiella stercoravium
aaccggaaagcagcgttgctgctggcagaaccggcccggcagcgagtcgccgtcgggagagaatatcaggaggcggcaggcatgcctgcaccgcagcctgcttcgaggtacatctcacaacccgcttcgcggattgtgtctccgccttcggctgtacccctgcgcattctgcagaatcagagtattgtgtcggac

SEQ ID NO: 15942 - RNA, 215 nt, unidentified
  source 1..215: mol_type = other RNA; note = Related to DWUW01000200.1; note = Candidatus Eisenbergiella stercorigallinarum
gcccgttcgacagagaaaccggaaagcagcattgctgctggcagaaccggcccggcggcgagtcgccgtcgggacagaatatcaggaggcggcaggcatgcctgcaccgcagcctgcttcgaggtacatttcacaacccgcttcgcggattgtgttgccgccgtcggctgtacccctgcgcattctgcggaatcagagtattgtgtcggccgggc

SEQ ID NO: 15943 - RNA, 219 nt, unidentified
  source 1..219: mol_type = other RNA; note = Related to DXDD01000050.1; note = Candidatus Eisenbergiella pullistercoris
cccctgccggcagggaaaccggaggcagccgtcagggctgcgcacagcttcggaccggcggcgagtcgccgccgggagacaggatcgggagaaggcaggatggcctgcaccgcagcctgctccagggtacaacgcacaattccgcttcgcggattgtgtcgccgctttcggctgtacccctgcgcattctgcggaatcagcgtattgtgccggaagggg

SEQ ID NO: 15944 - RNA, 196 nt, unidentified
  source 1..196: mol_type = other RNA; note = Related to DWWS01000044.1; note = Candidatus Eisenbergiella merdavium
ccggaagcgtcagcgtgtctgaatgcaaagaccggcccggcggcgagtcgccgccgggaaagatcatcaggaggcggcaggcatgcctgcaccgcagcctgcttcaaggtacgtcgcacaatccgcagagcggattgtgtcagccgccttcggctgtacccttacgcattctgcggaatcggagtatcgtgtcggg

SEQ ID NO: 15945 - RNA, 216 nt, unidentified
  source 1..216: mol_type = other RNA; note = Related to DWWH01000066.1; note = Candidatus Eisenbergiella intestinipullorum
gcccgcccggcagaaaaaccggaaacagacggctcggaaagcgtctttcggaccggcggcgagtcgccgccgggacagatcaatatcaggcggcaggcgcgcctgcaccacagcctgcttcagggtacatctcacaacccgcttcgcggattgtgcagccgccttcggctgtacccctgcgcattctgcggaatcagaacaaggtgccggacgggt

SEQ ID NO: 15946 - RNA, 198 nt, unidentified
  source 1..198: mol_type = other RNA; note = Related to AP025576.1; note = Lachnospiraceae bacterium
acccggctgacagcatatccggaaactggagttttccggcctgacggggagtccccgccgggaaaaacagacagccaggacgcaggtgccctgcgaccgcaagctgttccaaagtacatcagcacactcccgtgtgcacaccgcctgcggctgtacatttccacagcttacggaatcggtgtattgtgtcagccggtg

SEQ ID NO: 15947 - RNA, 198 nt, Eisenbergiella tayi
  source 1..198: mol_type = other RNA; note = Related to NZ_MCGI01000005.1
atccggctgacagcatattcggaaaattaattttccggcctgacggggagtccccgccgggaagaacaggctgcgcggacgcaggtttcctgcgaccgcaagctgctccaaggtacatcagcacactttacgtgtgcacaccgccttcggctgtacatttccgcagcttacggaatcggtgtattgtgtcggccggat

SEQ ID NO: 15948 - RNA, 209 nt, Eisenbergiella sp.
  source 1..209: mol_type = other RNA; note = Related to NZ_QVLV01000005.1
agccggccggcagcatatccgggagaatattttccggcctgacggggagtccccgccgggagttagaaacagtgggcatgcagaatactgcatgcagaatcctgcacccgtaatccgctccaaagtacatccgcacacttccgtgtgcacaccgccttcggctgtacatttccgcagcttacggtatcggtgtattgtgccgtccggct

SEQ ID NO: 15949 - RNA, 215 nt, unidentified
  source 1..215: mol_type = other RNA; note = Related to RAYB01000053.1; note = bacterium 1XD21-70
aagacggcagcagatgaatcagcacttttttgcatggagacaggccaggaagggctggacgggcgccgagtcggcacccggtacagaaaatgccaggaaagcccacagcctgccctaaggtacagccgcacctttcaggtgcatcccgccgtttgcaccggcgtttggtacctatgcgcagtctgcggaatccctatataaagtgctgccgtttt

SEQ ID NO: 15950 - RNA, 216 nt, unidentified
  source 1..216: mol_type = other RNA; note = Related to RAYY01000002.1; note = bacterium D16-56
aaagcagccgcagacaagccagggtatttgatggatgagattcagacatcaacagactttgggcggacggcgagtcgccgcccggaaaaaacagtgacaggaaagtccgcagccagctccaaggtacatccgcacattacatgtgcttcgcgccggcttcaccggcgtatggtacctttgcgcagcctgcggtatccgaatgagtgcggctgcttt

SEQ ID NO: 15951 - RNA, 196 nt, Enterocloster bolteae
  source 1..196: mol_type = other RNA; note = Related to CP069520.1
ggaaaagcaacagcattttcaggaatattgcataggcagtaagcctggacggacagcgagtcgctgcccggagtgaatagcagagggataagtccgcaagctgcgccgtggtacatccgcacatttcatgtgcccgccgctttgcggcccggtacccctatgcatcttacggtatccggatacgtgttgcttctcc

SEQ ID NO: 15952 - RNA, 195 nt, Enterocloster sp.
  source 1..195: mol_type = other RNA; note = Related to JAKNTH010000001.1
ggaaaagcaacagcattttcaggaatattgcatgggcagtgagcctggacggacagcgagtcgctgcccggagtgaacagcagagggatgagtccgcaatctgcgccggggtacatccgcacatttcatgtgccggccgccagcggcccggtacccctatgcatcttacggtatccggatacgtgttgcttctcc

SEQ ID NO: 15953 - RNA, 183 nt, unidentified
  source 1..183: mol_type = other RNA; note = Related to DWYS01000122.1; note = Candidatus Enterocloster faecavium
cgggcgttggcagcgaaatcagagcaatgctttgggcgggcggcgagtcgccgtccggagtgggagaactcagggatcagcccccaggcagctacgatgtacggccgcacatttcatgtgcataaagcctgcggctttgtacatctgcgcttcctggtctatccctgtcagtgctgacgccca

SEQ ID NO: 15954 - RNA, 183 nt, unidentified
  source 1..183: mol_type = other RNA; note = Related to DWWB01000077.1; note = Candidatus Enterocloster excrementigallinarum
tctgcggcagcagcgaaatcaaagcggtgctttgggcgggcggcgattcgccgtctggagtaggaaattgaggggatcagcccgcaggcagctgcgatgtacggcagcacatttcatgtgcataaagcctgcggctttgtacatctgcgcagcctgcgctatccttgtttgtgctgccgccca

SEQ ID NO: 15955 - RNA, 205 nt, Lacrimispora sp.
  source 1..205: mol_type = other RNA; note = Related to JAJCIC010000013.1
ctttatgcagcagcgaagccggttaagccaggagaaattgtaccggaatgaccggacggacggcgagtcgccgcccggaagaaaatagtaatgggacagaccgtaatcagctccgaggtacatcagcacatttcatgtgctatgctgctgacgcagcttgtacatctgcgcagcttacggtatcgggaatcagtgctgcgggctg

SEQ ID NO: 15956 - RNA, 180 nt, unidentified
  source 1..180: mol_type = other RNA; note = Related to DWWT01000008.1; note = Candidatus Enterocloster excrementipullorum
caaaagcagcagcccagccggaagaatcctttcggacgggcggcgagccgccgcctggaatttttttgttgtgacacagtccgcaagctgctccgatgtacttctgcacactgcatgtgcccggcctgcggcccggtacacctttgcagcttacggtatccgtaaacgtgctggattttg

SEQ ID NO: 15957 - RNA, 183 nt, Clostridium celerecrescens
  source 1..183: mol_type = other RNA; note = Related to NZ_PGET01000001.1
gcagaagcaatagtatttccgcatgtaatgatcctgcggccgggcagcgagtcgctgccgggaatttcatggtttaggcaaaggccataatctgctgcgaggtactaccgcacattgcatgtgcctgcgcctgcggcttgtacatcttcgcatcttacggcatcatgtttgtattgcttctgt

SEQ ID NO: 15958 - RNA, 276 nt, Clostridium indolis
  source 1..276: mol_type = other RNA; note = Related to NZ_AZUI01000001.1
gcagaagcaatagtatttccgcgagaaatgggccaaaggaatatgatgtatatacgtttggcccatgccgcggcagctgagaaaaacctgcatagcgtgtttttctcagctgccggcagaataaatctccggccgggcagcgagtcgctgccgggattttcatggtatggaaaaaggccgtaatctgctgcgaagtacttccgcacattgcatgtgcttccgcctgcggcttgtacgtcttcgcatcttacggcatcaaatttgtattgcttctgt

SEQ ID NO: 15959 - RNA, 191 nt, Clostridium aerotolerans
  source 1..191: mol_type = other RNA; note = Related to NZ_JHWJ01000001.1
gcagaagcaatagtttttccggattaagtattcggccgggcagcgagtcgctgtccggatcatcataggatcataatagaccgcaagctgctgcgaagtaccaccgcacattgcatgtgcatgcgcatgtgcgggacacatgcgtgcgtacgtcttcgcatcttacggtatcattttagtattgcttctgc

SEQ ID NO: 15960 - RNA, 188 nt, Lacrimispora algidixylanolytica
  source 1..188: mol_type = other RNA; note = Related to NZ_MCIA01000032.1
gcagaagttatagtttttccggtaaaactgccggctgggcagcgagtcgttgttcggattatcatagggttacaatagaccgcaatctgctgcgaagtacttccgcacattgcatgtgcatacgcatgtgcaagacatgcgcgcgtacatcttcgcatcttacggtatcattttagtattgcttctgc

SEQ ID NO: 15961 - RNA, 190 nt, Hungatella effluvii
  source 1..190: mol_type = other RNA; note = Related to NZ_QJKD01000014.1
cagggaatcatagcttttccggaaccataaaggagatccggccgggcagcgagccgctgtcaggaatgtcatttttttaaggtcaaaagaccgtaatctgctccgaagtacatccgcacatttcatgtgcttacgcctgcggcttgtacatcttcgcatcttacggcatcctttttcgtatgatttcctg

SEQ ID NO: 15962 - RNA, 189 nt, Hungatella hathewayi
  source 1..189: mol_type = other RNA; note = Related to NZ_WNME01000006.1
cggagattcatagcatttccagtattgcttagaggctccggccgggcagcgagtcgttgtccggaagttcacaagttaaggtcataagaccgtaatctgctccgaagtacaactgcacatttcatgtgcttacgcctgcggcttgtacgtcttcgcatcttacggcatcctttttcgtatgagtttcca

SEQ ID NO: 15963 - RNA, 188 nt, Enterocloster aldenensis
  source 1..188: mol_type = other RNA; note = Related to NZ_QSGP01000002.1
agtggaatgatagcatttccggaatcctgagcggatccggccgggcagcgagtcgctgtcaggaacatcatgatagtaaggccgaaagaccgtaatctgctccaatgtacaaccgcacattccatgtgcacacgcctgcggcttgtacatctgcgcatcttacggaatccccttttgtatcatccact

SEQ ID NO: 15964 - RNA, 188 nt, Enterocloster citroniae
  source 1..188: mol_type = other RNA; note = Related to FOZH01000006.1
gcagtggatcatagtgtttccggtaccacagcgggaccggccgggcagcgagtcgctgtcatggacatgtcatagcagggccgcaagaccgcaatctgctccgaggtacaaccgcacatttcatgtgcacacgcctggggcttgtacatctgcgcatcttacggtatcctttttcgtatgatccctgc

SEQ ID NO: 15965 - RNA, 185 nt, Coprococcus sp.
  source 1..185: mol_type = other RNA; note = Related to NZ_FNWC01000007.1
gcaggaacgatagcatatccaagacagatgttttggcaggggagcgagtcgctgcccggtacaggagatgaaacgatgaaacgataagctgcttcgaggtacttttgcacacttcgtgtgcatggaccttgcggtccgagtacatctacgcatcttacggaatcactttattgtattgttcctgc

SEQ ID NO: 15966 - RNA, 196 nt, unidentified
  source 1..196: mol_type = other RNA; note = Related to JAGZOR010000071.1; note = Lachnospiraceae bacterium
gcagaaacaatagcagaactgaaaggacaaaatgccgtttcagcaggggagcgagtcgctgtccggtaaagtaaatgggaacatgaaacgggaagatgctgcgaagtacaaatgcacactgccgtgtgctgcggtcgctgttgcgactatggtacatcttcgcacttccggtatcaatatattgtattgtttctgc

SEQ ID NO: 15967 - RNA, 201 nt, Blautia sp.
  source 1..201: mol_type = other RNA; note = Related to NZ_OIWX01000001.1
gcgggaacaatagcatatccggtatctttacgctttgctgtactgaaccggtcggggggcgagtcgccgcctgatcataaacggggagacattagacttccgaacgctccgaggtacttctgcacactgcgtgtgctgtacggccttcggcctatgtacatctgcgcattctccagaatcaccttcttgtattgttcccgc

SEQ ID NO: 15968 - RNA, 201 nt, Blautia producta
  source 1..201: mol_type = other RNA; note = Related to NZ_CP035945.1
gcgggagcaatagcatatccggtatatctgtaagctgatcactgataccggtcggacggcgagtcgccgcctgatgataaattgggagaaatcagacttccgaaggctccgaggtactactgcacactgcgtgtgctgttcggcctccggcctgtgtacatctgcgcattctccagaatcaccctcttgtattgctcccgc

SEQ ID NO: 15969 - RNA, 201 nt, unidentified
  source 1..201: mol_type = other RNA; note = Related to DNJM01000030.1; note = Lachnospiraceae bacterium
gcaggagcaatagcagatccggtatgcaaggtgttgtatccggtcggacggcgagtcgccgcctgattccagaaaaagagaacataagactttcagatgctccgaggtacgtccgcacacgatgtgtgcatatggtcccggaatccgggacctgagtacatctgcgcatcttacagaatccccttattgtattgctcctgc

SEQ ID NO: 15970 - RNA, 314 nt, unidentified
  source 1..314: mol_type = other RNA; note = Related to KE159610.1; note = Lachnospiraceae bacterium M18-1
gcaggaataatagcatatccgttttcaaccgaaaggtaagaaaaggagctgtttacagagtatttctgagcagctcccagacggcagggcggcgagtcgccgtccgagaaacgatcatcagcgctccatccggaaaagggcatgtgcagaaaatctgtccgtagcagtttttccgtgctttcgccggatggagcaccggagagataagacctccggatgctccgatgtacttccgcacacttccgtgtgcttttccggcatagccttggtacacctgcgcatcctatggaatccattttttgtattgtttctgc

SEQ ID NO: 15971 - RNA, 353 nt, unidentified
  source 1..353: mol_type = other RNA; note = Related to QXWX01000071.1; note = Lachnospiraceae bacterium
gcagaagcaatagcatatccgtttttatccgaaagaaaggatcaggtgctgttcgcagagttttttgtacggctccaaaacggcagggcggcgagtcgccgtccgggaaacaatcatcagcgctccatccggacagaccatatatggaaatgcctgcggtattttttcatacagaaccatcgtatgcagaaaatctgtctgcggcagttcctctgtctttcaccggatggagcaccggggacataagacctccggatgctccgatgtacttccgcacacttccgtgtgcttttccggcatagccttggtacacctgcgcatcctatggaatccattttttgtattgctcctgc

SEQ ID NO: 15972 - RNA, 330 nt, Schaedlerella arabinosiphila
  source 1..330: mol_type = other RNA; note = Related to NZ_RHJS01000002.1
gcagggacaatagcatatccgtttttcatccgaaaggaatgatcaggaacggttcgtaaaataattctgaaccgtttcctaacggcagggcggcgagtcgccgtctggaagcaatagagaactgcagaaaataactcctgcatccatgtatgtctgagttgtttttctgcagttccgatacagcgctccatccggcagaacggatggagcatcagggacagaagaccttcggatgctccgatgtacttctgcacactaccgtgtgcgtttccggcatagccttggtacacctgcgcatcctgcggaatccattttttgtattgttcctgc

SEQ ID NO: 15973 - RNA, 199 nt, unidentified
  source 1..199: mol_type = other RNA; note = Related to CP060635.1; note = Proposed Wansuia hejianensis
gcagggacaatagtatatctgggtttgcctgataactgacagcatgtccagccggatggcgagtcgccgtctggtaaagaaaaagaagccataagactttcagatgctccgaggtacttcagcacactagcgtgtgcaggcggctgcgcctgtgtacatctgcgcatcttacagaatcaccttattgtattgtccctgt

SEQ ID NO: 15974 - RNA, 200 nt, Blautia sp.
  source 1..200: mol_type = other RNA; note = Related to CP084061.1
acagggacaatagcatatctggatctgtctgaaataggacagcatatccagccggatggcgagtcgccgtccggtatagaaaaagagaccaaaagacttccagatgctccgaggtacttcagcacactgccgtgtgcaggcggcttacgcctgtgtacgtctgcgcatcttacagaatcaccttcttgtattgtccctgt

SEQ ID NO: 15975 - RNA, 200 nt, unidentified
  source 1..200: mol_type = other RNA; note = Related to NZ_LT574838.1; note = Proposed Bariatricus massiliensis
acagggacaatagcacatccgggcatgtttgtacgagtacggcatatccggcggggcggcgagtcgccgtcctgcagaacaagggaaagtatgagactttcagatgctgctaggtacttcagcacactgcgtgtgcatgtcggcctgcgcctgagtaccccttcgcatcttacagaatcaccatattgtattgtccctgt

SEQ ID NO: 15976 - RNA, 197 nt, Ruminococcus gauvreauii
  source 1..197: mol_type = other RNA; note = Related to NZ_CABLBR010000003.1
gcagggacaatagcatatccggatcgatacaggaatgtagagaccggccgggcggcgagtcgccgtctggtgaggaaaatcaggccatcagacttccagatgctgcgaggtacttcagcacaccggcggtgtgcatacgggcgctgccctggtacgtcttcgcatcttacagaatcatcttattgtattgtccctgt

SEQ ID NO: 15977 - RNA, 222 nt, unidentified
  source 1..222: mol_type = other RNA; note = Related to GL945165.1; note = Lachnospiraceae bacterium 1_4_56FAA
acagggacaatagcatatccattgatttttgcggcggctctgtaaggagccgccgtaagtattttgtgggcgggcggcgaaacgccgcccggaacttctaaccgaatgcaggaaactgacgccgtttccgaggcactactgcacactgcgtgtgccggatcggcttgcgcctatggtgcatcggaaccggcttacagaatctccttattgtattgtccctgt

SEQ ID NO: 15978 - RNA, 209 nt, Clostridium sp.
  source 1..209: mol_type = other RNA; note = Related to WQPN01000006.1
gcaggagcaatagtgttaccggtaaactttaaatagcttccggcccggcggcgagtcgccgccgggttcatgttattcagagcaaagtctgtatatgctgcgaagtacaaccgcacacctgcggcgcttttggcgcctctggtgtgcttacgcctgcggcttgtacatctccgcatatacagtatcttcttttttagtattgcgcctgc

SEQ ID NO: 15979 - RNA, 190 nt, Clostridium sp.
  source 1..190: mol_type = other RNA; note = Related to PKUU01000015.1
gcaggagcaatagtgtaaccggtttgactgaaaggattaccggcccggcggcgagtcgccgccgggaacatgatattcggaacaaagtctgtatatgctgcgaagtacatctgcacactatggtgtgcttacgcctacggcttgtacatctccgcatatacagtatcttctttttcagtattgcgcctgc

SEQ ID NO: 15980 - RNA, 202 nt, Clostridium symbiosum
  source 1..202: mol_type = other RNA; note = Related to AP025571.1
gcaggaaccatagcgcagccaaagcatccgctttgggccggcggcgagtcgccgccggcggttatcaaagtcagacgcaggcagggcctgcagacttcaatttgctgcaaggtacgccgcacactttgtgtgctttctgtggctttgccacagtccggtacatcttcgcatattgaagaatctttttaagtatggttcctgc

SEQ ID NO: 15981 - RNA, 178 nt, unidentified
  source 1..178: mol_type = other RNA; note = Related to RAYU01000170.1; note = bacterium 1XD42-8
gcaaggacaatagacgatccagaaaaaactggccagggggcgagtcgccgtctggaatagaatggataggaaaaagaccccaatagcttcaatgtacttctgcacatttcatgtgctatgtgcctgcggccagtacatttacgcatattgtgatatcggataatagtattgtccttgc

SEQ ID NO: 15982 - RNA, 201 nt, unidentified
  source 1..201: mol_type = other RNA; note = Related to JAGZJZ010000010.1; note = Clostridiales bacterium
acagaggcattagtatttccggagatattttctctggccgggcagcgagtcgctgtccggatatgtatgattgaagattggtgcaggtctgcctgcacaccgtaaactgctgcgatgtacttctgcacactgcttgtgcaccgccgccttcggctcgtacagcttcgcattttacgtatcacctttttgttttgcctctgt

SEQ ID NO: 15983 - RNA, 190 nt, Robinsoniella peoriensis
  source 1..190: mol_type = other RNA; note = Related to NZ_FMJR01000027.1
gcagagacattagtatttccataaattttggccgggcagcgagtcgctgtctggaattgtattcttgcagatcggtgcaggcctgcctgcacaccgtaaactgctgcgatgtacttcagcacaatgcttgtgcggccttcggttggtacaacttcgcattttacgtatcacctttttgttttgcctttgc

SEQ ID NO: 15984 - RNA, 199 nt, Lactonifactor longoviformis
  source 1..199: mol_type = other RNA; note = Related to NZ_FQVI01000010.1
acagcggctgcagccaatccaaagttatttttggccggatggcgagtcgcctccccggaatcatgcaaacagtatcaggtgcagtgccctgcaccccgaaagctgcctgcaaggtacttcggcacacttcgtgtgctttggccttcggccttgtacctttccgcagctttcggtatctccttatttgtgctgccgctgt

SEQ ID NO: 15985 - RNA, 220 nt, Cuneatibacter caecimuris
  source 1..220: mol_type = other RNA; note = Related to NZ_SGXF01000003.1
cgcaagacaacagtgtttctgaatacatttcagaagggcggcgagtcgccgtccgcaaagtgattggagaaggcagctgcgaagcagcggcacagttcctgtgcctgcctgcggcttgccaggtacttccgcacacggagtgtgcacggctgggcgcagagcgcccaaacgcctgagtaccaggccgcctccggcagatcttcttttggtgttgtctggg

SEQ ID NO: 15986 - RNA, 259 nt, unidentified
  source 1..259: mol_type = other RNA; note = Related to DVJD01000043.1; note = Candidatus Fimimorpha excrementavium
acagggacaacagagaaattcagttttgacagacatggtctgggaaaaagctgaccggtcggcgagtcgccgcctggaagagatggcagcctgggctgccaaatcaggaagacagaccagaagcagctccaatgtacgtccgcacatttgcgatgggaccacatttacatgtgttcccgtctccaatgtgcatgaacgccggaggcgttcggtgtacacctgcgctgcttatggaatcacctttttgtgttgcccctgt

SEQ ID NO: 15987 - RNA, 183 nt, Escherichia coli
  source 1..183: mol_type = other RNA; note = Related to CP065613.1
gcagtggcaatagcgtttccggcctttgtgccgggagggtcggcgagtcgccgacttaacgccagtagtatgtccatatacccaaagtcgcttcattgtacttaagtacgcttcgcgtacgtcgcgctgacgcgctcagtacagttacgcgccttcgggatggtttaatggtattgccgctgt

SEQ ID NO: 15988 - RNA, 180 nt, Pseudocitrobacter faecalis
  source 1..180: mol_type = other RNA; note = Related to NZ_BNAA01000006.1
gcagtggcgatagcgtttctggagttatccagaagggtcggcgagtcgccgacttcacgcccgcagttcactcatatacccaaagtcgttccattgtacctcggcacgtttcacgtgcgcgcgctgtcgcgcgaagtacatttccacgccttcgggatggttttcgagtatcgccgctgt

SEQ ID NO: 15989 - RNA, 187 nt, Leminorella richardii
  source 1..187: mol_type = other RNA; note = Related to NZ_LS483470.1
gcggagacaatagcgttttcaggcgcattgtcctgaacggatcggcgagtcgccgatctggcacgagcagtttggccacaaggccctaagtcattccaaagtacctcagcacgctctgcgtgcgacgcgctaacgcgctgagtacgttttcacgccttagggatcggctttatcgtattgtcgccgc

SEQ ID NO: 15990 - RNA, 185 nt, Leminorella grimontii
  source 1..185: mol_type = other RNA; note = Related to NZ_JMPN01000024.1
gcggtagcaatagcgttttcagacgttctcgtttgaacgggtcggcgaatcgccgactttacgcaagcagcttggcccatataccctaagccgcgtcaaagtacatcagcacgctttgcgtgcgacgcgcttacgcgctaggtacgtttccacgccttagggatcgcttatcgtattgccgccgc

SEQ ID NO: 15991 - RNA, 175 nt, Yokenella regensburgei
  source 1..175: mol_type = other RNA; note = Related to NZ_RBIZ01000005.1
agcagcagacgcagctttcccagtgaaatcactggcggagcggcgagtcgccgttctgtatttatttctgcgacattgaccctaaggtgttccggagtacgacagcacactacgtgtgcgcgcttcgcgaaggtacaccttcacaccttacggaatcattttgtggtgcgctgct

SEQ ID NO: 15992 - RNA, 174 nt, Enterobacter sp.
  source 1..174: mol_type = other RNA; note = Related to OBEF01000007.1
agcagaagcagctttcccggttgaaacaactggcggagcggcgagtcgccgttctgtactgactacctgcaacgctgaccctaaggtgctccggagtacggctgtacacgttgtgtacccgcttcgcgaatgtacaccttcgcaccttaaggaatcattttgtggtgctctgct

SEQ ID NO: 15993 - RNA, 180 nt, Enterococcus sp.
  source 1..180: mol_type = other RNA; note = Related to NGMM01000007.1
acagagatgatagcgcatgcgatcgtccagatcgatctgatggtgagtcaccatcggagaggaataagggattatattcactgtaagctgatcaatgtacgcccgcacatttcatgtgcttccgccttcggctttgtacatctcacaacttacagtatcgaatttttgtgtcgtctctgt

SEQ ID NO: 15994 - RNA, 180 nt, Erwinia sp.
  source 1..180: mol_type = other RNA; note = Related to WLYM01000046.1
aaagagagaatagcataactgaaacttgctttcagcctgatggtgagtcacctttgggaaaaaataatcgtgaatagtttcctgtccctcgttcaaggtacgaccgcacactacatgtgccgcgcctttggctaggtacctcttacaaggaacaggatcgttttttagtattctctctcc

SEQ ID NO: 15995 - RNA, 179 nt, Vagococcus acidifermentans
  source 1..179: mol_type = other RNA; note = Related to NZ_NGKC01000006.1
aatgaggagatagccaatttgattgaaatcaattcaagagcgagtcgctcttgaaaaatagcacgggagcgattgttactgtaattcgttcaatgtgcttcagcacatgatatgtgctacagtctgcgacgacgcacatctcgctcattacagcatcatttttaagtatctttctcatt

SEQ ID NO: 15996 - RNA, 180 nt, Listeria goaensis
  source 1..180: mol_type = other RNA; note = Related to NZ_FYBT01000001.1
gaagaggcaatagtttgtctaatcacatagttagacaaggatggcgagtcgtcatctgaacacaagaattcgagcattagccataaaatgctacaatgtacaactgcacattaaaatgtgctggcctgtcggcaagtacatctccgcattttacggatcgatttttagtattgcctcttt

SEQ ID NO: 15997 - RNA, 179 nt, Listeria fleischmannii
  source 1..179: mol_type = other RNA; note = Related to KQ130610.1
tgagaggcaaaaggatgtctattaaccgaataggcgaggatggcgagtcgtcatctggatttagaaatgtatagattagccaccaaatgcgaaggtgtactacagcacatttcatgtgcctcgccaagtggcaagtacacctctgcatttgatggatcggtttttcgttttgcctcttt

SEQ ID NO: 15998 - RNA, 185 nt, Listeria costaricensis
  source 1..185: mol_type = other RNA; note = Related to NZ_FXUT01000001.1
gaagagatcctagcaaaaaccggaattcattctggatctgttggcgagtcgccaccggataagtttctttatcggttagccgcgatctgctttaaagtactaccgcacactgcatgtgcgttcgccgacaagcggctagagtactttgacgcgactcacggttcgctttttagtaggatctcttc

SEQ ID NO: 15999 - RNA, 184 nt, Anaerovorax odorimutans
  source 1..184: mol_type = other RNA; note = Related to JAJFDR010000002.1
acagagacaatagcgaagccggactttgtttcgggcgggcggcgagtcgctgtctgtatggtgagtatgagcagatcagaccgaatccggctgagatgtacttctgcacatttcatgtgcagaccttgcggtcttaggtgtacatcggcgcagattcggaattttcattttgtattgtctctgt

SEQ ID NO: 16000 - RNA, 229 nt, unidentified
  source 1..229: mol_type = other RNA; note = Related to DVGX01000291.1; note = Candidatus Ventrisoma faecale
acagaggcaatagctcagtcagacattcaatgcggcatgcagggataatctggcccgtcggcgagtcgccgccgggaggaaacacacaaggacgcgcaggcccgcagggccagcgaccataatctactgcgaagtacgccggcacacggatgtgtgcacggaccgcatgtcccatgcggtatggtacgtctgcgtatcttatggaatccttttctagtattgcctctga

SEQ ID NO: 16001 - RNA, 199 nt, Pragia fontium
  source 1..199: mol_type = other RNA; note = Related to LR134531.1
atagaggcaatagcttattcagatagaattatctggatccgttggcgagtcgtcaccggataatcgatatagctaagttatgccagaccataagctgctgcaaagtacctcagcacactttgtgtgcgacgccttcggttgacctccggctgagtacgtctccgcagcttacggtatcgttttatagtattgtctctat

SEQ ID NO: 16002 - RNA, 183 nt, Budvicia aquatica
  source 1..183: mol_type = other RNA; note = Related to PDDX01000001.1
atagaggcaatagcttatccggggaatcttatccggatccgctggcgagtcgtcaccggataatcgatatctgagctatagaccctaagttgctccgaagtacctcagcacacttcgtgtgcgacgcctttggctgagtacgtctgcgcaccttagggtatcgttttatagtattgcctctat

SEQ ID NO: 16003 - RNA, 194 nt, Saezia sanguinis
  source 1..194: mol_type = other RNA; note = Related to NZ_PQSP01000009.1
gcagaggcaatagcttatccggatgagtcaacctcatctgggccggcagcgagtcgttgccggtaaatggttacctggaaaactcagaccatcatatgctccaatgtaccgctgcacattgcatgtgcgcatagccttcggcttttcggtacacctccacatatgatggaatcactttagcgtattgcctctgc

SEQ ID NO: 16004 - RNA, 182 nt, unidentified
  source 1..182: mol_type = other RNA; note = Related to JAFYPD010000088.1; note = Peptococcaceae bacterium
gcaggaacaatagcctatctgaatggatgcattcagcctgacggcgagtcgccgccgggaattcgcaagctgccagatgcagaccatctttgctccaaggcacatccgcacacttcgtgtgcaattgcatttcatgtgcccctccgcatgcgatggaatctctctttttgtattgttcctgc

SEQ ID NO: 16005 - RNA, 136 nt, Ruminococcus sp.
  source 1..136: mol_type = other RNA; note = Related to JAFRDE010000015.1
tcttttgcggcagagtacatctttgatttttcaaaggacggacagcgagtcgctgcccgggttttacgaaaagcctcgcattccgcctgcggcgtaatgcgtacaccgcttatgcggatagttagtgccgcaaaga

SEQ ID NO: 16006 - RNA, 137 nt, Ruminococcus sp.
  source 1..137: mol_type = other RNA; note = Related to JAFRBD010000130.1
tcttttgcggcagagtacatctttgatgtttcaaaggacggacagcgagtcgctgcccggggtttatgtgaagcctcgcattccgcctgcggcgtaatgcgtattccgcgtacgcggatagttagtgccgcaaaagc

SEQ ID NO: 16007 - RNA, 140 nt, Ruminococcus sp.
  source 1..140: mol_type = other RNA; note = Related to JAFRBX010000029.1
ctttttgcggcagagtacatctttgatttgtttcagaggacgggcggcgagtcgctgtccgggcatcacgagaaaccgcgcattccgcttgacgcgtaatgcgacaaccgcctgaggcggatagttagtgccgcaaaagc

SEQ ID NO: 16008 - RNA, 189 nt, Ruminococcus sp.
  source 1..189: mol_type = other RNA; note = Related to JAFORM010000263.1
gttttcgcggcagcgaacatctttgtttttcaaaggacgggcagcgagtcgctgtccggttttattactgcggcgttccttttccgtgaaaaggaacgttccgcaaatcttctccgctgagagtggaaaatcacttcatgatttatttctcagctccgcagctttgcggtcattgagtgccgcgaaaac

SEQ ID NO: 16009 - RNA, 177 nt, Ruminococcus sp.
  source 1..177: mol_type = other RNA; note = Related to JAFOUX010000084.1
tgagaacagcaaaacggttttatgaggacggtcagcgagtcgctgtccggatagagagtaagatcagtattcgcgcggcgaatacgaagccgcaaatccgctccgccgaattaaagttcgctgcacgaactaaagattcgtctgcacggctttacggacatttagtatcagctcacg

SEQ ID NO: 16010 - RNA, 189 nt, unidentified
  source 1..189: mol_type = other RNA; note = Related to JAFUNJ010000009.1; note = Clostridia bacterium
tctttcgcagcagcgtacacaccgtttttgcggaaagggcagcgagtcgctgctttgttggtttgcccgggagcatcgcgtttgttttgaaaaacaaacgctgcctgaaaatgcctcaacgagcaaaaaaatcattccatgattgtctgctcgcctcgccatattcaggacttttcgtgctgcgaaaga

SEQ ID NO: 16011 - RNA, 188 nt, unidentified
  source 1..188: mol_type = other RNA; note = Related to JAFSIW010000012.1; note = Clostridia bacterium
ctttttttggtagtgaaccatcttgttttggcaagagcggtcagcgagtcgctgtaccgaggctttgaagtccctccgccatcctgcggatggcacatgcccgtaaaaatgctctcggtgaatgaaaaatcactgcgtgattagcaattcaccttcgcatattcacggaatttttgtaccaaaaaaag

SEQ ID NO: 16012 - RNA, 183 nt, unidentified
  source 1..183: mol_type = other RNA; note = Related to JAFNUN010000059.1; note = Clostridia bacterium
tcagccacaatagtgtagaacttgcttttttgcgagtgtaggcggcgagtcgccgttttgctttatttatttagaacgtaaatcttagaatttacccaaagaatacgctacaatgaaccaagaatcactgcgtgatttaaagttcatcttcgctttattcttaacattatgtgttgtggctga

SEQ ID NO: 16013 - RNA, 189 nt, Ruminococcus sp.
  source 1..189: mol_type = other RNA; note = Related to JAFSEL010000040.1
tctttcacaatagcgcacatcttaaaaaagttttaagaggggacagcgagtcgctgttctgttaattttaaattgagatagaacattccttagaatgttcgtaccaaacaacgctcctatgactaagaaatcattttatgattcagaagtcacatccgcttgtgtttggacattttgtattgtgaaaga

SEQ ID NO: 16014 - RNA, 193 nt, unidentified
  source 1..193: mol_type = other RNA; note = Related to SVPW01000009.1; note = Oscillospiraceae bacterium
cttttcacggtagtgtacatcttgtttacaagagggaacggcgagtcgccgtttcgttagttttcttgggatagccattttgtttaaaaaacaaaatggcattctccgcacatcgcttcatcgacattcaaatcacttcgtgattatctactgtcgactttagctatgttcggggattttgtaccgtgaaaag

SEQ ID NO: 16015 - RNA, 200 nt, Ruminococcus sp.
  source 1..200: mol_type = other RNA; note = Related to JAFUKO010000119.1
tcgcttgcagtagtgtaaatctctttgatttttttcaagggagggacagcgagtcgctgtttcggttttttaaaaaatgcgggctacggcttttgctcacaaaagccggctccaaattgctcttcgatgacatacaaatcactacgtgattagaaaaatgtcatctgcgtttaaatttggtcattttgtactgcgagcgg

SEQ ID NO: 16016 - RNA, 193 nt, Ruminococcus sp.
  source 1..193: mol_type = other RNA; note = Related to JAFOED010000001.1
ctgtctgcagtagcttacagcttaatgaattttaagcaggggtcagcgagtcgttgtcctgtgtgttaaaaaaatcgggtatagcttttgctatgcaaaagcgcagccaaaagtcgcttcggtgacataaaaatcactttgtgattaaaaatgtcactttcgctttattttggtcattttgtgctgtggacgg

SEQ ID NO: 16017 - RNA, 193 nt, unidentified
  source 1..193: mol_type = other RNA; note = Related to JAGBTD010000211.1; note = Clostridia bacterium
tcctcgacagtagttaacaacttttatctttatgatttaagtgaggtcagcgagtcgctgtcctgtgtttttaaccttcttccgcattgctgaacgcaatgcgcacatccgattaatgctccgtcgaacaaccaatcatttcatgatttcaggttcgcctccgcatcaaccgggcagaaagtactgtcgaggg

SEQ ID NO: 16018 - RNA, 190 nt, unidentified
  source 1..190: mol_type = other RNA; note = Related to SVPP01000010.1; note = Oscillospiraceae bacterium
accccgacaacagcgaacaatcccgccaaaagcaggaaggggcagcgagtcgctgtcttgtatattttttctcgggactgcgttttacaagtaaaacgcttgccgataatttcactacgccgaatcagaaatcacttcgtgattagaaattcgtcttcgttcattaccggacattttgtgttgtcggggt

SEQ ID NO: 16019 - RNA, 185 nt, unidentified
  source 1..185: mol_type = other RNA; note = Related to SVJN01000007.1; note = Oscillospiraceae bacterium
tattttacaacagtgtacaacctgatttattcaggagggggcagcgaggtcgctgtctcggatttacgcaaggttcgcatggcactctgcgagtgcgcctgaaagaaactccatcgaataaaggaatcaccttgtgatttaatattcgcctccgtttctttcagagaaaagtgtgttgtaaaagc

SEQ ID NO: 16020 - RNA, 186 nt, Butyricicoccus sp.
  source 1..186: mol_type = other RNA; note = Related to QUJR01000007.1
ccctttgcagtagcgtacaacctaaagccaatttctttaggagggacagcgagtcgctgttctggatttcaaggttatccgcatcgcatagcgatgcccaaatctgatacgctccggcgaatagccaatcacttcatgattctcgattcgcctccgcttaatcagaccattttgtactgcaaaggg

SEQ ID NO: 16021 - RNA, 201 nt, unidentified
  source 1..201: mol_type = other RNA; note = Related to DMLP01000060.1; note = Oscillospiraceae bacterium
ctccttgcagtagcgtacatcttaaagcgtaactttgagagggacggcgagtcgctgccctgattttctaaaggatttatgccttgccgcagatatatccgcggcaaggcgccgcccgataacactccgacgaacaaaagaataactccgttattttcagttcgcctgcgcttttatcgggtcattttgtactgcaagggg

SEQ ID NO: 16022 - RNA, 193 nt, unidentified
  source 1..193: mol_type = other RNA; note = Related to JACJKY010000027.1; note = Proposed Phocea massiliensis
ttctttgcagtagtgtacatcttaaagcattctttaagaaagggcagcgagtcgctgctttggtgatgaaactgagtgacgccttttcgctgacgaaaagcgcctacctgataacgcttcaacgaataccgattaactgcgttaataaaagattcgttttcgcttatatcaggatattttgtactgcaaagaa

SEQ ID NO: 16023 - RNA, 189 nt, Vescimonas coprocola
  source 1..189: mol_type = other RNA; note = Related to NZ_AP023418.1
ccccgcgcagtagtgtacagcttaaagtttcgtactttgaggagggtggcgagtcgccgctctgtttaccaagaggacgcacgcttcgcaagcgaagcgaccgcctgataccgctccatcgaatcgcgaatcacgccgtgattagaaattcgactccgcttatatcaggtcactttttactgcacgggg

SEQ ID NO: 16024 - RNA, 191 nt, unidentified
  source 1..191: mol_type = other RNA; note = Related to DVGI01000013.1; note = Candidatus Fimenecus excrementavium
ccttttgcagtagtgtacatcttaaagctttctttaagaggggcagcgagtcgctgtcttgttctcaaaaaaacggggtctcattttgcacgcaaaatgcacgcctgacgtcgcttcggcgaattcaataatcacttcgtgatttaccattcgcctgcgcttcttgtcaggacacgtagtactgcaaaagg

SEQ ID NO: 16025 - RNA, 194 nt, unidentified
  source 1..194: mol_type = other RNA; note = Related to SVPJ01000007.1; note = Oscillospiraceae bacterium
ttcttttccgcagcgtacatcttaaagtgttctttaagagggggcagcgaagtcgctgtttcgttttcaaacctgcattgcgctttcggtcaaaaccgaaagcgccgccctgatgtcgcgccgtcgagtaaccaatcacttcgtgatttcaaactcgcctttgctcgtatcaggacattttgtgcggaaaagag

SEQ ID NO: 16026 - RNA, 191 nt, unidentified
  source 1..191: mol_type = other RNA; note = Related to SVPN01000018.1; note = Oscillospiraceae bacterium
acggtcgctgtagtgtacagtctttgtattttcagagaggggacggcgagtcgccgtcttgttaacggaaaagaggtccggcactcgcgtgacgagtgctgactccgaataccgctccgacgaacaacaaatcactgcatgattttaaggttcgcctccgcttgtattcgggcaatttgtacagcgaccgt

SEQ ID NO: 16027 - RNA, 139 nt, Pseudoflavonifractor sp.
  source 1..139: mol_type = other RNA; note = Related to NFIH01000004.1
tgctttgcggtagagtacagggaacgaaaggttcaaggggcggcgagtcgccgtctggggtttcgatgcagtgttcgactttgactgggcaaagtcggtggcttgaatggatattcaagtattttggtaccgcaaggaa

SEQ ID NO: 16028 - RNA, 203 nt, unidentified
  source 1..203: mol_type = other RNA; note = Related to JAFQCR010000001.1; note = Clostridia bacterium
ttccctgcggcagcgtacatcttgaagtttctttaagaggggcggcgagtcgccgtcttgtgtttttacccgagcttctgcaaacgttattgcttcgcaatcacgtttgcagcccgcctgataacgttacatcgaactgatggtcacttcgtgaccaaaaggttcgccttctcttttatcaggtcattttgtgccgcagggta

SEQ ID NO: 16029 - RNA, 200 nt, unidentified
  source 1..200: mol_type = other RNA; note = Related to JAGAOS010000040.1; note = Clostridia bacterium
cttcttgcagtagcgtacatcttattttaagaatgggcggcgagtcgccgttcctgtgttttaaagggaattaccaatacggtctgcgtgttacgccacccgtattggcttttcataagaccgcttatagcgaataaatggtcacttcatgacctataaattcgctaacgctttcttatgtgattttgtactgcaggaag

SEQ ID NO: 16030 - RNA, 190 nt, unidentified
  source 1..190: mol_type = other RNA; note = Related to JAFVIF010000076.1; note = Clostridia bacterium
cctcttgcggtagcgtacgtctaaagcttgctttagggaggtcggcgagtcgccgtcctgttattctaaccctcaccgcttcgctaaaaagcgaagcgcatttccggataacgctgcggcgaataacccaatcatttcatgatttcaaattcgcctacgcttttatcaggacattttgtaccgcaagggg

SEQ ID NO: 16031 - RNA, 218 nt, unidentified
  source 1..218: mol_type = other RNA; note = Related to SVOI01000004.1; note = Oscillospiraceae bacterium
cactctacagtagtgtaaaatacttaaagttatctttaagtaaggtttaaaagaatagtcttggtgcctacagtgagcgaagtcgctctctgatgaactaaaaacttggaaatttcggcctccgccggttctcctgataacgctccaacgaataaaatgtcacttcgtgacacgcaattcgcctccgcttttatcaggtgagattgtactgtagagtg

SEQ ID NO: 16032 - RNA, 193 nt, unidentified
  source 1..193: mol_type = other RNA; note = Related to SVOH01000020.1; note = Oscillospiraceae bacterium
ccccttgcagtagcgtacatcttaaatgcaaatttaagcggggcggcgagtcgccgtctggattttttaaaaagggataactgcaagactacgtcttgcagccacctgataaacgctttgtcgaatttaatgtcactgcgtgacaaaaccattcgccgccgcttacttatcaggaattttgtactgcaagggg

SEQ ID NO: 16033 - RNA, 172 nt, unidentified
  source 1..172: mol_type = other RNA; note = Related to JAFOYN010000067.1; note = Clostridia bacterium
cccttttcagtagcgtacagcttgaagcaattcaagacgggcagcgagtcgctgtctgaggtttttgatggcccgtatccgcacgataaatccttcaatgggctcaatttttacttgcgtaaaaacaaaggcccaccttcgtatttatcatgtcattttgtactgaaaaggg

SEQ ID NO: 16034 - RNA, 187 nt, unidentified
  source 1..187: mol_type = other RNA; note = Related to JAFOFE010000078.1; note = Clostridia bacterium
ccctttgcagtagtgtacaacttgaagtatttcaagacgggcagcgagtcgctgttcggggtttttaaacctagcagtatttcttacgaaataccacctcctgataaatacttcaatgggcagcccgttatttcataacgtcagggcccaccttcgtatttatcatgtcattttgtactgcaaaggg

SEQ ID NO: 16035 - RNA, 172 nt, unidentified
  source 1..172: mol_type = other RNA; note = Related to JAFXAP010000013.1; note = Clostridia bacterium
ccccctacagtagcgtacagcttgaagcgattcaaggcgggcagcgagtcgctgtctgaggcacatttccgagccgagtttctcacctgataaatccttcaatgggtcatccgttattccataacgccacacccatcttcgtatttatcatgtcatttagtactgtaggggg

SEQ ID NO: 16036 - RNA, 187 nt, unidentified
  source 1..187: mol_type = other RNA; note = Related to JAFTLW010000024.1; note = Clostridia bacterium
ccccttacagtagtgtactacttgaagaaattcagggcggacagcgagtcgctgtctgtggcatattccgggtccgcgtttctaagcgaaacgcgccgcctgacaaacactgcaatgggctaaattttactacgtaaaaaagaccgcccacctccgtatttatcaggacattttgtactgtaagggg

SEQ ID NO: 16037 - RNA, 184 nt, unidentified
  source 1..184: mol_type = other RNA; note = Related to SVRX01000013.1; note = Oscillospiraceae bacterium
ccctttgcagtagagtacatcttgattaaagtttcaagacggtcagcgagtcgttgatcggtgtttattccctcgtgtgcggcatagccgcgtgcttgaaaaaaatctccatcgagccgctgagttacctccggtaactcagactctcgtcgatttttcccaagtcattttgtactgcaaaggg

SEQ ID NO: 16038 - RNA, 182 nt, unidentified
  source 1..182: mol_type = other RNA; note = Related to JAFVQI010000036.1; note = Clostridia bacterium
ccccccacagtagcgtacagcttgaaaaccgattttcaaggcgggcagcgagtcgctgtctgaggtccctgagggatccggccgttccggccatccacgataaatcctcgatgggttcccattttcttccgaaaataaccacccaccttcgtctttatcgtgtccttttgtactgtgggggg

SEQ ID NO: 16039 - RNA, 189 nt, unidentified
  source 1..189: mol_type = other RNA; note = Related to JAGBGQ010000166.1; note = Clostridia bacterium
atccttacagtagcgtacaacttgatttttcaagacggacagcgagtcgctgttcgaggtttttaaggtgatacgatattgaattacattcaatatcgccccatgacacttccttgatgagcagccaatcacgtatgtgatttttcggctcatctgcgtcggtatcatgacattttgtactgtaaggac

SEQ ID NO: 16040 - RNA, 201 nt, unidentified
  source 1..201: mol_type = other RNA; note = Related to SVPL01000026.1; note = Oscillospiraceae bacterium
ctctttgcaatagtgattgacttgattttatcaaggcgggggtggcgagtcgccacttaaggattttaaagtggattacgcttttcagtttttataaaaacctgaaaagcgccgctgtaaaccgcttctttgaacacagtaatcactgcgtgattttaagttcaactacgcttgtttacagtgcttttgtattgcaaagag

SEQ ID NO: 16041 - RNA, 167 nt, unidentified
  source 1..167: mol_type = other RNA; note = Related to RKDE01000011.1; note = Clostridiales bacterium
gcagctatgatagcgattaccttaagcagtgtaaggttggacagcgagtcgttgcccataataaacaattaagcacaacaaataaacaaagtttcgctgaattaaaaattgctaccacaattcagaattcacctcaacttatgttttatcgaaagtatcatagctgc

SEQ ID NO: 16042 - RNA, 173 nt, Eubacterium sp.
  source 1..173: mol_type = other RNA; note = Related to JAFUWO010000134.1
acagctatggtagcgattaccttgattgatattaaggttgagtggcgagtcgccattcataatgatatatttgaaagatactgacgaacacagcctcaacgaattccaaatagcgctgaagcactattcaaaattcgcctcggctatgtccgtatctaaagtaccatagctgt

SEQ ID NO: 16043 - RNA, 156 nt, unidentified
  source 1..156: mol_type = other RNA; note = Related to NZ_HG005285.1; note = Candidatus Stoquefichus massiliensis AP9
ttatgaacaatagtgatatacgaaactttagcgagtcgctaaagaatgagaaaaataaagacatggaaattgtcatattccaaggggcttaactacacgagacatgtagagtcaccgcccatttccatatgacaatatcatttgtattgttcagca

SEQ ID NO: 16044 - RNA, 166 nt, unidentified
  source 1..166: mol_type = other RNA; note = Related to NZ_LN852692.1; note = Candidatus Stoquefichus sp. SB1
ataagaacaatagtgaaaggaatatacctcctttagcgagtcgttaaaggtcaagaagaattatgatatggaattgttatatttcaatggacttaactacactaacatgtagacgctaacgcttcggcccatttccatataacaatatcgtaagtattgttcttat

SEQ ID NO: 16045 - RNA, 180 nt, unidentified
  source 1..180: mol_type = other RNA; note = Related to DVII01000099.1; note = Candidatus Coprovivens excrementavium
acaagagcagtagtgattggaattttataaaaaaaaattccccctttaatgagtcattaaagatcaaagtaacatttaagattgaattgtaatattccataagacttctctacactgcgtgtagaaacgctgacgcttacgtcgaattccatattacaatatctgaagtattgctcttgt

SEQ ID NO: 16046 - RNA, 168 nt, unidentified
  source 1..168: mol_type = other RNA; note = Related to DVML01000007.1; note = Candidatus Fimihabitans intestinipullorum
gattttgcagtagtgattggaattatttcctactttaacgagtcgttaagggactagattgatgataacgataaaattgtaatattccaaaggactaacctacacggtgtgtaggcgcttcgctttaagtccatttccatattacaatatcgctagtactgcacacag

SEQ ID NO: 16047 - RNA, 177 nt, unidentified
  source 1..177: mol_type = other RNA; note = Related to JAFRQS010000031.1; note = Bacilli bacterium
acctgtgcagtggcgattggatttatttctactttaacgagtcgttaagggacaatattaattaagatgattaaattataattctccaaaggactaaactacatttcatgtagacgcttcgttgcactacgctttaagtccatttccaaattataatatcattagcactgcataaaa

SEQ ID NO: 16048 - RNA, 179 nt, Clostridium sp.
  source 1..179: mol_type = other RNA; note = Related to FR887372.1
attctcggcagtggtgattggaattatttcctactttaacgagtcgttaagggactaatttatttaagatgatttaatagtaatacttcaatgaacttacctacatttcatgtagtcgcttcgctatgctacgctttgagttcatctccatattacaatatcatgagcactgcaatagt

SEQ ID NO: 16049 - RNA, 180 nt, unidentified
  source 1..180: mol_type = other RNA; note = Related to DLWG01000243.1; note = Firmicutes bacterium
ttttatgcagtagtgattggaattttttttcctactttaacgagtcgttaagggacgatatttatttaagagattgaatagtaatattccaagggacttatctacaccttgtgtaggcgctacgcgatgcttcgctttaagtccatctccatattactatatcattagtactgcatatat

SEQ ID NO: 16050 - RNA, 164 nt, unidentified
  source 1..164: mol_type = other RNA; note = Related to JAFRAB010000047.1; note = Erysipelotrichaceae bacterium
acagttgcagtagtgattggagcaattcctgccttagcgagtcgttaagggacagttttattaccgggatcaattgcaatatttcagtgggcgacactacatttcatgtaggaggcttcgcttcgcccacttccatatttcaatatctttagtactgcagaagg

SEQ ID NO: 16051 - RNA, 164 nt, unidentified
  source 1..164: mol_type = other RNA; note = Related to JAFWHJ010000089.1; note = Erysipelotrichaceae bacterium
acaattgcagtagtgattggagcaattcctgccttagcgagtcgttaagggacagttttattaccgggatcaattgcaatattacagtgggcgatactacatttcatgtaggaggcttcgctccgcccacttccatatttcaatatctttagtactgcagaagg

SEQ ID NO: 16052 - RNA, 166 nt, unidentified
  source 1..166: mol_type = other RNA; note = Related to JAFTRC010000024.1; note = Bacilli bacterium
ttttgagcaatagtgtatggatttattccaactttaacgagtcgttaaagtacgattttaactataatatataattgtaatattccaaaggaccaacctacaccctgtgtagtcgcttcgcttttagtccatttccatattacaatatcttaagtattgctctaaa

SEQ ID NO: 16053 - RNA, 166 nt, unidentified
  source 1..166: mol_type = other RNA; note = Related to JAFQQQ010000003.1; note = Bacilli bacterium
tttcgagcaatagtgtatggatttattccagctttagcgagtcgttaaagtacgtttttaactataatataaaattgtaatattccaaaggaccaacctacacgctgtgtagtcgctacgcttttagtccatttccatattacaatattttaagtattgctcttaa

SEQ ID NO: 16054 - RNA, 173 nt, unidentified
  source 1..173: mol_type = other RNA; note = Related to JAFQTN010000005.1; note = Bacilli bacterium
tcagtatcaatagcgtttggattttctaatccactttagcgagtcgttaaagcataaaatttattaatatgatgaattgtaatactccaatggacctaactacactacgtgtagcgcggcttcgccttatagtccaattccatattacaatatcactaatgtattgatactac

SEQ ID NO: 16055 - RNA, 171 nt, Coprobacillus sp.
  source 1..171: mol_type = other RNA; note = Related to HF998250.1
tattaagcaacagcgaataggaattaattattcccactttagcgagtcgttaaagttctaaaataatatagataatgattgaactattccagtggagtatactacatttcatgtagccgctaacgcttctctccaccttcatatttcaatatcactaagtgttgctaaaag

SEQ ID NO: 16056 - RNA, 158 nt, Mycoplasma sp.
  source 1..158: mol_type = other RNA; note = Related to HF993109.1
aatcaagcaatagcaattggttttaaaccactttgatgagtcatcaaggatatttaattaaagaattatgtgattatattactccaagtgattactctaaacgttatttagttaaatcactctccataatataatatcacatcaagtattgcttattt

SEQ ID NO: 16057 - RNA, 173 nt, unidentified
  source 1..173: mol_type = other RNA; note = Related to DVMT01000048.1; note = Candidatus Aphodocola excrementigallinarum
tgtaagcaagtagcgttttgattttttttaaaaatctttttagcgagtcgctaaagtaagaaacactaaataaatacattatattgataacgctcaatgtatcatattacgcttaaaagcgtaaatgaaacatacatttcgctagttacaatatattatagtacttgctttat

SEQ ID NO: 16058 - RNA, 195 nt, unidentified
  source 1..195: mol_type = other RNA; note = Related to HF990861.1; note = Firmicutes bacterium CAG:822
gtaagagcaatagtggtttgaaaattatttcatactttagcgagtcgctaagggactagattaagtgttacaataatgattatagaatttaaatcattatgattgtaatattccaccgtgcttaactacactacgtgtagtcgcttacgctttatgcacgttttcatattacaatatcttgggtattgctctttt

SEQ ID NO: 16059 - RNA, 181 nt, unidentified
  source 1..181: mol_type = other RNA; note = Related to SVAM01000009.1; note = Firmicutes bacterium
aggaaagcagtagatttatctaatttatttagatagaaagacgagtcgtctgttcgaaaagaatttattatacatatttgcttatattgtacgaagtagagcgcctaaaggctatagtatatttccaatatacttatctacatcttaacaatacaagataattttaaagtactgctttttt

SEQ ID NO: 16060 - RNA, 159 nt, Ruminococcus sp.
  source 1..159: mol_type = other RNA; note = Related to JAFWVI010000074.1
cagccgtcggcagtgaatttgcacaagcaaagctgcggcgagtcgccgcggatgattttaggaataagaccgatataaaaagttcttcaccgaatccaaattaactgcgttaataaaaattcggctccgaacattttaatgcttttgtgccggcggctg

SEQ ID NO: 16061 - RNA, 160 nt, Ruminococcus flavefaciens
  source 1..160: mol_type = other RNA; note = Related to FPJT01000001.1
cagccgtcggcagcgaatttgcacaagcaaagctgcggcgagtcgccgcggatgatttcaggaatattaccgatataaaaagttctccaccgaatcatgaattaacttcgttaatagaaattcggctccgaacattttaatgcttttgtgccgtcggctg

SEQ ID NO: 16062 - RNA, 159 nt, Ruminococcus sp.
  source 1..159: mol_type = other RNA; note = Related to JAFTYF010000065.1
cagccgttggcagcgaatttgcacaagcaaaactgcggcgagtcgccgcgggtgattttaggactaagatcaaaataaaaagttctccaccgaatccgaattaactgcgttaataaaaattcggctccgaacgttttaatgcttttgtgccggcggctg

SEQ ID NO: 16063 - RNA, 160 nt, Ruminococcus flavefaciens
  source 1..160: mol_type = other RNA; note = Related to NZ_JAEF01000007.1
cagccgttgacagtgaatttgccaagcaaaactgcggcgagtcgccgcggcattttttaggaataagaacataagcaaaagtttctccgccgaataaaatattaacggtgttaatttaaattcggctccgaaacatttgaatgctttgtgtcaacggctg

SEQ ID NO: 16064 - RNA, 159 nt, Ruminococcus sp.
  source 1..159: mol_type = other RNA; note = Related to JAFPPE010000436.1
cagccgccggcagcgtatttgtaaaggcaaaactgcggcgagtcgctgcggcttttttcagaattatgtccattatcaaaagtttttcactgaataactgctaacgctgttagctataaattcagtttcaaaacatttgaatctttgtgccggcggctg

SEQ ID NO: 16065 - RNA, 172 nt, Ruminococcus sp.
  source 1..172: mol_type = other RNA; note = Related to JAFXEJ010000141.1
cagctgtcggcagcgaatttgcaaatgcatctgcaatgcattactgcggcgagtcgccgtggggatttttaggaataagtccataatcaaaagtttctccaccgaatttaaattaacttcgttaatacttattcggttgcgaaacatttgaatgcttttgtgccggcagctg

SEQ ID NO: 16066 - RNA, 173 nt, Ruminococcus sp.
  source 1..173: mol_type = other RNA; note = Related to JAFVBU010000121.1
cagctatcggcagtgatattgcaaatgcatttccgcaatgcacgactgcggcgagtcgccgtggagttatcaggaatgagcccattatcaaaggtttctccgctgaataataaattaactgcgttaatagaaattcagctccgaaacatttgaatgttttgtgccgatggctg

SEQ ID NO: 16067 - RNA, 173 nt, Ruminococcus sp.
  source 1..173: mol_type = other RNA; note = Related to JAGAMS010000071.1
caactgtcggcagcgatattgcaatgcgtaactgcaagcgcataactgcggcgagtcgccgtgggtttttttaggaacaagtccattatcaaaggtttctccactgaatctaaattaacttcgttaattataattcagctccgaaacgtttgaatgttttgtgccaacagtat

SEQ ID NO: 16068 - RNA, 163 nt, Ruminococcus flavefaciens
  source 1..163: mol_type = other RNA; note = Related to UETD01000003.1
cgggctgcggcagcgtaacgcatgatgtgcgactgcggcgagtcgccgcggaaatcatttaaaaccacggactttatcacaagtttctccgacgaattccaattaactccgttaataataagattcgtctccgaaacatatgaatgttttgtgccgcagcctg

SEQ ID NO: 16069 - RNA, 164 nt, Ruminococcus flavefaciens
  source 1..164: mol_type = other RNA; note = Related to NZ_ATAX01000036.1
agggctgcggcagcggtgcacatgatgcgcgactgcggcgagtcgccgcggaagatcattctcaggtaaggactttgtcataaattcctccgacgaatttcaattaacttcgttaataaggttattcgtctccggaacatatgaatgttttgtaccgcagcctt

SEQ ID NO: 16070 - RNA, 159 nt, Ruminococcus sp.
  source 1..159: mol_type = other RNA; note = Related to JAGPNI010000006.1
cagctgccggcagcgttttgcactgcatacagcggcgagtcgccgctgggctttcaggagtatccacatgagcaaatgcctgctccgctgaataattccgtcaactgtgttgactaaaattcagctccccagcatttgaatgatctgtgccggcagcct

SEQ ID NO: 16071 - RNA, 159 nt, Ruminococcus sp.
  source 1..159: mol_type = other RNA; note = Related to JAFUAO010000003.1
agacgccggcagcgttttgcacttgcatactgcggcgagtcgccgcagggctttcaggaatatccacatgagcaaatgtcagctccactgaataaataagtcaacttcgttgacttcaattcagctccgccgcatttgaatgttttgtgccggcagtct

SEQ ID NO: 16072 - RNA, 171 nt, unidentified
  source 1..171: mol_type = other RNA; note = Related to JAFZOZ010000090.1; note = Clostridia bacterium
cgggcgccggcagcgatactgcagcggcaggcacactgcatgaccgcggcgagtcgccgcgggagcgttcagatcacagcccatgatcaaaagtttctccaccgaataagaattaactgcgttaatcggaattcggctccgaaacatttgaataccttgtgcccgcgtccg

SEQ ID NO: 16073 - RNA, 159 nt, Ruminococcus sp.
  source 1..159: mol_type = other RNA; note = Related to NZ_HF545616.1
caagcgtcagcagcgatattgcaaaacgcataactacagcgagtcgctgtggaagtttcagggaatagtagctttgtcaaaagctttttcaccgaatcggatttaattccattaaataaaattcggctccaaagcatttgaatcttgtgctgacgcttg

SEQ ID NO: 16074 - RNA, 237 nt, unidentified
  source 1..237: mol_type = other RNA; note = Related to SVTP01000007.1; note = Oscillospiraceae bacterium
ggcagaacaacagtgtatttcgattttcgaaagggatggcgagtcgtcatcttttcacctacggttagcgtattcgctgcacaagccctgcaaaagtctttccgacacgcgagcgtctcgggacttttgacgtcggtcttgttccgctcagtcgaaatgctcgacgaagtgatacaaggcgatgccttgtagtactacgtctgcgcgtttcgccatacaaattggtgttgttctgat

SEQ ID NO: 16075 - RNA, 249 nt, unidentified
  source 1..249: mol_type = other RNA; note = Related to SVQS01000086.1; note = Oscillospiraceae bacterium
aacagaacaacagtgtatttcgatttttttcgaaagggatggcgagtcgtcatcttttcactcatggctatcgtattcgctgcacaagccctacaaaagtcttccgacacgcgagcgtttcgggacttttgccaacggtcttgttccactcagtcgaaatgctcgacgtagtctagcaaggtttcgtaaaactcaccttgctatcggtacgtctgcgcgtttcgccatacaaattggtgttgttctaat

SEQ ID NO: 16076 - RNA, 234 nt, unidentified
  source 1..234: mol_type = other RNA; note = Related to SVRN01000036.1; note = Oscillospiraceae bacterium
aacagaacaacagtgtatttcggtattcgaaagggatggcgagtcgtcatcttttcactcacgctcagctcattcgctgcacaagccctacaaaagacttccttcggaagcttttgctgaacggacttgttccactcagtcgaaatgctcatcgtagcgccgcaaggttacgtaaactacaccttgctgatctacgtctgcgcgtttcgccatgcaaattagtgttgttctatg

SEQ ID NO: 16077 - RNA, 237 nt, unidentified
  source 1..237: mol_type = other RNA; note = Related to SVST01000008.1; note = Oscillospiraceae bacterium
aacagaacaacagtgtatttcggtttctacgaaagggatgacgagtcgtcatcttttcactcatattgatcgtattcgcggcacaagtcctacaaaagcttttctcgaaagcttttgcttaacggacttgttccgttcagcctaaccgcgccactgtagtcaccgcaaggctccgcacgcttcaccttgctaaactacacctctgcgattagccatacaaattcgtgttgttctgaa

SEQ ID NO: 16078 - RNA, 253 nt, unidentified
  source 1..253: mol_type = other RNA; note = Related to JAGALS010000020.1; note = Clostridia bacterium
caaggaacaacagtgtatttcatttttgaaagggatggcgagtcgccatcttttcactcacgtttgtctcattctctgcacaagcctacaaaaaagctttcttgcgatcgcaagcgattctcagaaactttttgtgcttaacggcttgctccgctcagcctaaatgctcaccgtagccgaggcaaggttgcgcaagcttcaccttgcaaaactacgcttgcgctttagccatgctgattcgtgttgttccaaa

SEQ ID NO: 16079 - RNA, 262 nt, unidentified
  source 1..262: mol_type = other RNA; note = Related to JAFTNT010000011.1; note = Clostridia bacterium
cttagaacaacagtgtatttcgttttttacgaagggggtgacgagtcgtcaccttttcacccaagcttaacgtattcgttatacaagcctacaaaaaagctttcttccgcaaatcgcaagcgatttcttcagaaactttttatgcttaacggcttgctccactcagcctaaatgctcgatgtattcgatgcaaggcgtcgcaggctttgccttgcttaaatacgtctgcgcgtttagccatgcaaattagtgttgttctaaa

SEQ ID NO: 16080 - RNA, 250 nt, unidentified
  source 1..250: mol_type = other RNA; note = Related to JAFVUY010000073.1; note = Bacilli bacterium
tatagaacaacagtgtatttctttttatagaagaaagggatggcgagtcgtcatcttatcacttatatttaccgtattcgctgcacaagtcctacaaaagctttttcttctattcggcaggctcattcagaaaaacttttgcttaacggtcttgttccgttcagtcgaaatgctcatcgtagtcccgcaaagctatgctttgcccccctacgtctgcgcgtttcgccatacaaattggtgttgttctata

SEQ ID NO: 16081 - RNA, 261 nt, unidentified
  source 1..261: mol_type = other RNA; note = Related to SVHW01000007.1; note = Clostridiales bacterium
aatagaacaacagtgtattttgacttttgtcaaaaaggatggcgagtcgtcatcttgtcacttatatgtatcgtattcgctgcgcgcaacctacaaaagaaatattgcgtccgagacatttcattgacgtcaatattcttttgtgtaacggttgtgctccgctcaactgcaatgctcgacgtagccacgcaaggcttcgcaggctacaccttgcctaactacgcctgctgcgtttcgtgtacaaattggtgttgttctaaa

SEQ ID NO: 16082 - RNA, 243 nt, unidentified
  source 1..243: mol_type = other RNA; note = Related to JAFXAN010000018.1; note = Clostridia bacterium
tgaagaacaacagtgtatttcgattctcgaaagggatggcgagtcgtcatcttgtcacttatatttagcgtattcgctgcacaagcctacaaaagcttttcctcggtgctcggttcgcattcgaaaaagcttttgcttaacggcttgctccgctcagctgaaagcctcgacataattctgcaaggcttcgccttgctattctatgtctgcgactttcatcatacaaattagtgttgttctgaa

SEQ ID NO: 16083 - RNA, 259 nt, unidentified
  source 1..259: mol_type = other RNA; note = Related to JAFTHO010000004.1; note = Clostridia bacterium
gacagaacaacagtgcatttcggtttttatcgaaagggatgacgagtcgtcatccttgcaattatctttaacatattcgttacacacaccctacgaaaaatcgtttgtatcgaaaaatccgttgtgattttgtctcacaaacgtttttcgtggccgggcgcgttccgctcagacgaaatggtcggcgtataggatgcaaagcggtgctttgctgcaatacgcctgcacattacgccatacaaacaagtgttgttctgtc

SEQ ID NO: 16084 - RNA, 180 nt, unidentified
  source 1..180: mol_type = other RNA; note = Related to JAFVYN010000052.1; note = Clostridia bacterium
aaatgaacaatagtgtttcgactctgtcgacggggcggcgattcgccgtcctttcacgcatatccttcgtattcgctgcgctcaaagaaatcgcttggcgtaatcgcttcgctttgtgcgactgacgtcgcacggaaatacgccgcacgatatcttatgcacaatttgtattgttcaagg

SEQ ID NO: 16085 - RNA, 183 nt, unidentified
  source 1..183: mol_type = other RNA; note = Related to JAFTKF010000062.1; note = Clostridia bacterium
aaatgaacaatagtgtatttcgattctgtcgaaacgggcggcgagtcgccgtctgacacccctacccttccgtattcgcaaggctcagatgaaatgcttggcgtaaacgctggcgctttgtgcgccttcggcgcacggatatacgcccgcgcatttcctcatacaaatctgtattgttcgaag

SEQ ID NO: 16086 - RNA, 191 nt, unidentified
  source 1..191: mol_type = other RNA; note = Related to JAFTRY010000008.1; note = Clostridia bacterium
aagaaaacaatagtgttattcgatttatcaatcgaaccgtgagcgagtcgctctcggtattcaaatattttcgtattcgcaagctcaaatgaaaagcttgaagtaaaccgcgcacagagtgcgctaaatgcgactgacgacgcatttcattactcctgcgcttttcatcatacaattagtattgtttaagg

SEQ ID NO: 16087 - RNA, 189 nt, unidentified
  source 1..189: mol_type = other RNA; note = Related to SVSM01000002.1; note = Oscillospiraceae bacterium
aaaaaaacaatagtgttattcgatttattatcgaaccgtgagcgagtcgttctcggcagttaatcttttcgtattcgcaggctcaaatgaaagagcttgaagtaattcgcgcacaagtgcgctatatgcgactttcgtcgcatatccttactcctgcgcctttcattatacaatttgtattgtttgagg

SEQ ID NO: 16088 - RNA, 203 nt, unidentified
  source 1..203: mol_type = other RNA; note = Related to JAFVSI010000037.1; note = Clostridia bacterium
aaatgaacaatagcgttattcggtttttaaatcgagccgtgagcgagtcgctctcggtagcaaaatttttcacgtattcgcagggctcaaatgaaaatcttgaagtaagaccgcaatactgtgcaagcacagtttgctaatgtgcgacaagtcgcaccgagttactcctgcgtttttcattatacaaatagtattgttcaagg

SEQ ID NO: 16089 - RNA, 188 nt, unidentified
  source 1..188: mol_type = other RNA; note = Related to SVRW01000015.1; note = Oscillospiraceae bacterium
atttgaacaatagcgttataggtttttacatgccgtgagcgagtcgctctcggaagaattaaactatcctcattcgttttactcagatgaaaacgtcgggagtaagcgcgcactgtgtgcgcttaagtgcggcaagccgcaccacattacacccgcccttttcaccatacaataagtattgttcaaaa

SEQ ID NO: 16090 - RNA, 191 nt, unidentified
  source 1..191: mol_type = other RNA; note = Related to JAFTKI010000072.1; note = Clostridia bacterium
cttcgaacaatagcgttattcgattttatcgagccgtgagcgagtcgctctcggtaacccgcaattccccgtattcgctgtcgctcagcgaaaagtcttggagtaagtcgcgcaaaaatttgcgctgagtgcggcatagccgcactactttacaccttcgcctttccgtatacaatcagtattgttcaaaa

SEQ ID NO: 16091 - RNA, 208 nt, unidentified
  source 1..208: mol_type = other RNA; note = Related to JAFVTO010000133.1; note = Clostridia bacterium
gcacgaacaatagcgttgggatgatatcctctcaggagcctgactccggatgactcatcctccgtcggcgagtcgcctacggaaaaagtataatacccgtattcgctacgctcagatgaaaatctcagcgtaaacgcttcgcttagttcgtcgttgccgaactgcattacgcttgcgattttcagcatgcacatagtattgttcaaga

SEQ ID NO: 16092 - RNA, 193 nt, unidentified
  source 1..193: mol_type = other RNA; note = Related to JAFTUH010000073.1; note = Clostridia bacterium
tcccgaacaatagtgtcacttgatttttcaagccggcagcgagtcgctgtcggaggcagtaaccctgccgtattcgctgcgctcagatgaaaatgctcggagtaaaaaccattcctgcggaatggtgacgtacgccttcgacgtacctcattacacctgcgcttttcagcatacaaatttgtattgttcaggg

SEQ ID NO: 16093 - RNA, 176 nt, unidentified
  source 1..176: mol_type = other RNA; note = Related to JAGBRZ010000213.1; note = Clostridia bacterium
tgcaaggcaatagtgttgttcgttttattacgacattgatagcgagtcgctatcgataacatcaaaccttatctcattcgcgcagctcaagcaaagttgctcaatgtagtttagaggcacacttcatgtgcggcactacatttcgccccattgctatacaaatgtattgccttgca

SEQ ID NO: 16094 - RNA, 174 nt, unidentified
  source 1..174: mol_type = other RNA; note = Related to JAFTOR010000034.1; note = Clostridia bacterium
cgcaaggcaatagtgttgttcgtttgattacggcgttgatagcgagtcgctatcgataacatttagccttataccattcgcgttgctcaagcaaaatgctcaatgtagctcgcggcacatttcatgtgctaaactacatttcgccttattgctatacaaatgtattgctttgcg

SEQ ID NO: 16095 - RNA, 172 nt, unidentified
  source 1..172: mol_type = other RNA; note = Related to JAGAMD010000012.1; note = Clostridia bacterium
catagggcaatagtgtattccatttaggagtcgatagcgagtcgctattgatacaattcaattttacatatttcgcaaatgctcaagcaaaaacactccatgtagtaaatccgcccaccatatgggctgtcctacatatcgcattcttgccatacaaatgtattgtcctatg

SEQ ID NO: 16096 - RNA, 185 nt, unidentified
  source 1..185: mol_type = other RNA; note = Related to JAFQLX010000091.1; note = Clostridia bacterium
taaagggcaatagcgatttttgtttataatacaaactcggcggcgagtcgccaaccgagccgcatttaccccgtatattgagacgaaagtgagcgcagtatcatagcacattttatgtgcacgtgcgcgttttgcgcacttaatacagcgcttcatttcgccatacagcattgtattgccctttt

SEQ ID NO: 16097 - RNA, 430 nt, unidentified
  source 1..430: mol_type = other RNA; note = Related to JAGBUH010000087.1; note = Clostridia bacterium
taaagaacaatagcgtgaatttggtattcttatcaaaaacggcggcgagtcgctgtcgtatagcataaaagagtcgaacccataatggtttgaaaagctattttcgcccataatttcgcaattctcgttaggaatacgcccgtattccgtcgctcaccttgctcattctggacaaaaatttcaatttcaaacgcacctacggcgaggtagtttcgagaagaaattttgtttttgagcgcagatatactaacgtatatcaagcgaaaaaacaggcattgtgtgttcgattcttttatgctatagcacaaaaccttcgtatatcgcgcgtcgcgcacgaaaaattgctcgaagtagaactgcacacgctgtgtgcgcgctttcgcttttctacatctgcgcattttccgtatacaaaatgtattgttctggt

SEQ ID NO: 16098 - RNA, 173 nt, unidentified
  source 1..173: mol_type = other RNA; note = Related to JAFSIE010000307.1; note = Clostridia bacterium
agcagagcatcagcgtttttcagcttttgcctgaatcgtcagcgagtcgctgccgatagcgtaacctcgtatactcgcacagctcgagagaaattgctggatgtgttaaagcacatgatatgtgcaaataaacacatctgcacaatttcctatacacatagtcttgctctgct

SEQ ID NO: 16099 - RNA, 192 nt, unidentified
  source 1..192: mol_type = other RNA; note = Related to JAFTLM010000135.1; note = Clostridia bacterium
aacagaacggtagcttgtttcggatatccgaagtcggcggcgagtcgcctccgacagtaaaaaactttttcgtattcgcgttgctcagccgagcgttcttcagcgtagccggtacacagagtgtacctcgagcacacgttgtgtgctacactacgcctacgcccgtcgtcatgcaaaaaagtaccgtcagaa

SEQ ID NO: 16100 - RNA, 193 nt, unidentified
  source 1..193: mol_type = other RNA; note = Related to JAFNUZ010000041.1; note = Clostridia bacterium
aagtgaacggtagcttatttcggatatccgaagtcggcggcgagtcgccgtcgataattttcaagcttttcgtattcgctttgctcagccgagcgttcttcggcgtagccggtacacgctgtgtaccttcagcacaccttgtgtgcgttcctacgcctacgcccgtcgtcatgcaaaaaagtaccgttgaaag

SEQ ID NO: 16101 - RNA, 165 nt, unidentified
  source 1..165: mol_type = other RNA; note = Related to JAGBSO010000048.1; note = Clostridia bacterium
tcaggagcaatagattttatcttttttcaagatagcgtcagcgagtcgctgaacgtaattttcaatcgtataacgcgggcgaaatgctcgctataatccaacacactgacatgtgtcaaaagttatagcttcgcatttcggcatacggatattgtattgctctga

SEQ ID NO: 16102 - RNA, 227 nt, unidentified
  source 1..227: mol_type = other RNA; note = Related to JAFQKX010000056.1; note = Clostridia bacterium
ataggaacaatagcttttgtcaaaattatggcaccggcagcgagtcgccgtcgggtagcatgaagtattcgtattcgcttgcgctcagtcgaattgctcgcagtatttcagcacacgttgtgtgcgccaccgcgacgtgagtaaaatatgcctgcgtcatattctactcacgtccgcacccaaaatactgctgcgcacttcgccgtacatcattgtattgttccgta

SEQ ID NO: 16103 - RNA, 201 nt, unidentified
  source 1..201: mol_type = other RNA; note = Related to JAGAUY010000021.1; note = Oscillospiraceae bacterium
tcaggaacaatagcttttgtcaggccactggcaccggcagcgagtcgctaccgggtagcgcatatttcacgtattcgcttcgctcagacgaactgcttgcagtattccagcacacgttgtgtgcccaccgcggcacatttcatgtgcccgcaccccggatactgctgcgcacttcgccgtacatcattgtattgttccact

SEQ ID NO: 16104 - RNA, 202 nt, unidentified
  source 1..202: mol_type = other RNA; note = Related to JAFQIL010000045.1; note = Oscillospiraceae bacterium
ttaggaacaatagcttttgtcagaatactggcaccggcagcgagtcgcttccgggtagcatccatccaccgtattcgcttcgctcagccgaactgcttgcagtatttcagcacacgttgtgtgcgccaccgcggcacatttcatgtgcccgcaccctaaatactgcagcgcatttcgccatacatcattgtattgttccaat

SEQ ID NO: 16105 - RNA, 201 nt, unidentified
  source 1..201: mol_type = other RNA; note = Related to JAFQNL010000019.1; note = Oscillospiraceae bacterium
tgtggaacaatagcttttgtcagatcactggcaccggcagcgagtcgctgtcggatagcgcaaattcaacgtattcgcttcgctcagccgaactgcttgcagtattcctgcacacgctgtgtgcccaccgcggcacatttcatgtgcccgcaccccggatactgctgcgcacttcgccatacatcattgtattgttccaga

SEQ ID NO: 16106 - RNA, 202 nt, unidentified
  source 1..202: mol_type = other RNA; note = Related to JAFVXA010000039.1; note = Oscillospiraceae bacterium
gtgggaacaatagcttttgtcagatcattggcaccggcagcgagtcgctgtcggcaggcacatggtatcgtattcgctttgctcagtggaactgcttgcagtatttcagcacactccgtgtgcgccaccgcggcacatttcatgtgcccgcaccccaaaatactgctgcgcatttcgccatacatcattgtattgttccgat

SEQ ID NO: 16107 - RNA, 174 nt, unidentified
  source 1..174: mol_type = other RNA; note = Related to JAFTVM010000054.1; note = Oscillospiraceae bacterium
catggaacaatagcttttgtcagacctctggcaccggcagcgagtcgctgccgggaagcacctggccatcgtattcgcttgcgctcagacgaactgcttgcggtattaccgcacacgctgtgtgctggagaatacccctgcacacttcgccatacatcattgtattgttccgga

SEQ ID NO: 16108 - RNA, 175 nt, unidentified
  source 1..175: mol_type = other RNA; note = Related to DVGO01000036.1; note = Candidatus Faecousia faecavium
tcaggaacaatagcgtttgtcaacacccgttggcatcggcagcgagtcgctgccggttcgcagaaacctgcctcattcgcaatgctcagcccaagtgcttgcggtatttccgcacaccctgtgtgctttcagataccgccgcacactttggcatacatcatggtattgttcctta

SEQ ID NO: 16109 - RNA, 177 nt, Pseudoflavonifractor sp.
  source 1..177: mol_type = other RNA; note = Related to WNBA01000006.1
cacggaacaaaagtgtccgtccggcagacccggcaccggcggcgagtcgccgccgggcggcagataccctatcgtattcgcttcgctcagccgaagcagcacagcggtattcctgcacactgcatgtgcatcaaaataccgctgagccgttcgccatacatcttgttttgttccgta

SEQ ID NO: 16110 - RNA, 178 nt, Oscillibacter sp.
  source 1..178: mol_type = other RNA; note = Related to KE159708.1
cacggaacaaaaggaaccgtccaatttcgattggcgccggcggcgtgtcgccgtccggttttcgcacacccaccgtattcgctccgctcagccgcgccgctccgaggtagaaccgcacggctgcaccgtgctcttgctaccgctccgcggcccgacatgcagatggttttgttccgaa

SEQ ID NO: 16111 - RNA, 171 nt, unidentified
  source 1..171: mol_type = other RNA; note = Related to DXIA01000170.1; note = Candidatus Pygmaiobacter gallistercoris
acagcaggcggcagaaaaagcctttttggccccgacagcgagtcgctgtcggtttgttttatcacacacaggtttcgctgacactcagccggtccgctggccgtattaccgcaaacggtgtttgctcaagatacggctgcacggccctgctacgttttgtaccgccgctgt

SEQ ID NO: 16112 - RNA, 170 nt, Anaerofilum sp.
  source 1..170: mol_type = other RNA; note = Related to JACONZ010000001.1
catgaacccggcagcaaaaagccgatccggcgccggcagcgagtcgctgccggaacatcgttcttcacaggattcactccgttcaggcggaaccgcttgccgtattcccgcaaacgctgtttgctgaaaatacggctgcgcggcccctctacgctttgtaccggctcatg

SEQ ID NO: 16113 - RNA, 180 nt, Flavonifractor plautii
  source 1..180: mol_type = other RNA; note = Related to CP048436.1
cacggaacaaaagagaagcccggctcagacgccggagccggccgcgaatcgcggccggtcccgcagactcacgcgtattcgcttcgctccgccgaagcgccgcagcggtatttcagcacacctgcggtgtgcagggggataccgccgcgccgttcgccatacagcaggttttgttccgaa

SEQ ID NO: 16114 - RNA, 190 nt, Butyricicoccus pullicaecorum
  source 1..190: mol_type = other RNA; note = Related to JAGZAL010000035.1
cataggacaaaagcgtttccgccttttggcgccggcggcgagtcgcccccggttttcgcacacccatccgtattcgctgcgctcagccgcactgctccgcggtattcccgcacattccatgtgcacggcacgccgccggcgtgctgacataccgctccgcagcacgccatacacatggttttgtccccgt

SEQ ID NO: 16115 - RNA, 197 nt, unidentified
  source 1..197: mol_type = other RNA; note = Related to BQNX01000001.1; note = Eubacteriales bacterium
tgcggaacatcagcccttggccaaatcgtttggcgccggcggcgattcgccgccggttcgagaaacctctgcgtattcgctgcgctccagcggcggtgctcgcagtatttctgcacactgcgtgtgctcagggcgcgctgggcgcgcccttcccatactgctgcgcccgcgcaatgcacattttgttttgttccgca

SEQ ID NO: 16116 - RNA, 179 nt, unidentified
  source 1..179: mol_type = other RNA; note = Related to QALD01000098.1; note = Oscillospiraceae bacterium
cgcggaacatcagtctttgtcccgacgttcgggcgccggcggcgagtcgccgccggttgtttgccgcctggttcgaatcgcgtgcgctcacccgccgccgcttgccgtattccaaggcacacgatgtgtgctcctatacggctgcgcggggcgcgatgcgtcatctgtgctgttccgcg

SEQ ID NO: 16117 - RNA, 206 nt, unidentified
  source 1..206: mol_type = other RNA; note = Related to JAFURT010000015.1; note = Clostridia bacterium
gaccggacagtagcgttgattcataattttatgaaagcggtagcgagtcgttaccgttgacctacccagcgtatatgcgtgcaagcacgagaaggcggcttgatgtgaagctgcccacggggggtgggcacacgcatccgacctttggtcggattgcgttttattcacatcggcaccgccgtctatacacacagttctgtccggtc

SEQ ID NO: 16118 - RNA, 175 nt, Fournierella massiliensis
  source 1..175: mol_type = other RNA; note = Related to JAFBIO010000002.1
aacagagcaatagttttgtcccgacccgggcaccggccgcgagtcgcggccgggatatggatccctggcatattcgctgcgctcaggcgagaccgcttgcggtattccggcacaccctcggtgtgcttaaaaataccgctgcgcggctccccatgcatattggtattgctctttt

SEQ ID NO: 16119 - RNA, 176 nt, Flintibacter sp.
  source 1..176: mol_type = other RNA; note = Related to NZ_CP044227.1
tggaaagcgatagtttttgtccgtctttggacctcgtccgcgtgtcgcggccgggtttatggattccatcgtattcgctgcgctcaggagaaagcgctggcggtattaccgcacatcgccgatgtgcttcatgataccgctgcacgcttccccatacacatttgtatcgctggaca

SEQ ID NO: 16120 - RNA, 175 nt, Pseudoflavonifractor sp.
  source 1..175: mol_type = other RNA; note = Related to JACJJD010000020.1
ttcagggcagcaggctctgacctcaattggtccccggccgcgagtcgccgccgggctgcaaaagcttgtcgtattcgctgcgctccggcgaaccatccagcggtataaccgcacaccaaggtgtgctggaagataccgccggacggttccccatacacattggtgctgtccggcc

SEQ ID NO: 16121 - RNA, 175 nt, Dysosmobacter welbionis
  source 1..175: mol_type = other RNA; note = Related to NZ_CP034413.3
acaggggtgatagctgcagcccctttcgggcgccggccgcgagtcgcggccggttggctggattctggcgtatgcgcttcgcgcaggcgagcccgcttgcggtattggagcacacctgcgatgtgctggaagataccgccgcgcggttccccatacaaatttgtatcgctccgta

SEQ ID NO: 16122 - RNA, 175 nt, Intestinimonas sp.
  source 1..175: mol_type = other RNA; note = Related to NZ_LR130816.1
tgcggagcggcagtccccgtcccttaccgggcgccggccgcgcgtcgcggccggtcggcagcatccccgcgtattcgctgtgctcaggcgagccgccttgcggtatttccgcacaccggggtgtgcagacagataccgccgcggcgttcgccatacacatttgtaccgcttcgca

SEQ ID NO: 16123 - RNA, 176 nt, Ructibacterium gallinarum
  source 1..176: mol_type = other RNA; note = Related to NZ_JADCKB010000012.1
gctgaagccgtagtcaagtcatcatgacaccgggcgcgagtcgcgcccggttttttctttattatcgcagattcgctgcgctcaagaaagcggaaaaaccgcattcccgcaaactgcgtttgcaacaaaaaaatgcgccctttcctctttctatgcacattttgtacggcttcagc

SEQ ID NO: 16124 - RNA, 173 nt, unidentified
  source 1..173: mol_type = other RNA; note = Related to JAGBHD010000062.1; note = Oscillospiraceae bacterium
agttaagcattagcgttaattcaacgttgttgaatcgatagcgagtcgttatcgtctaactaaactattatgcattcgcatactcaagaaaattgcttgatgtgtttcagcatatttcatatgcaacaaaaacacatctgcgcaatttcctatactcatagttttgtttaact

SEQ ID NO: 16125 - RNA, 172 nt, unidentified
  source 1..172: mol_type = other RNA; note = Related to JAFXAP010000004.1; note = Clostridia bacterium
agttaaacattagtgttaattcaaccttgttgaaacgatagcgagtcgttatcgcataactaaactattacatattcgtatactcaagtaaattgcttgatgtgtttaagcatatttcatatgcatcgcaacacatcttcacaatttcctatacacaaagttttgtttaact

SEQ ID NO: 16126 - RNA, 171 nt, unidentified
  source 1..171: mol_type = other RNA; note = Related to DVKV01000137.1; note = Candidatus Faecousia intestinavium
gcaggaacaatagccctgcccattttggcaccggcggcgagtcgccgccgggcggcggattttcgcctcattccctgcgttcagacgaagtcctcgcggtattcccgcacacgttccgtgtgctccaagataccgctgcgtcttcgccataccaaatggtattgttcccat

SEQ ID NO: 16127 - RNA, 184 nt, unidentified
  source 1..184: mol_type = other RNA; note = Related to JAFQDF010000039.1; note = Clostridia bacterium
aaatgaacagtagcgttatgtcataattacacctattcaagggtcttatgacaggtaacagcgagtcgctgttgcagatcattaattacaggcaaagatcaatgttgctcgctgtatatttttccaaacagggtttggcgtcatacagcttcacaaattgatatacagattgtactgttcatta

SEQ ID NO: 16128 - RNA, 179 nt, unidentified
  source 1..179: mol_type = other RNA; note = Related to JAFUMW010000045.1; note = Clostridia bacterium
agcaaaacaatagcgttagtcaatttcggcgtttgcggcgagtcgccgcagatatcgcaaacagtcacgtattcgcttcgctcaggcgaaaacgcttgcagtagaacgctgcgcttctatgcactgcgtgcataaaactacagcctcgcgtttcaccatacacattgtattgttttgca

SEQ ID NO: 16129 - RNA, 186 nt, unidentified
  source 1..186: mol_type = other RNA; note = Related to JAFPLT010000171.1; note = Lachnospiraceae bacterium
ccatagacaccagaaacaccgaagctttttttatgctttggaccggttccgagtcggaaccgggaacaggaaaatgagaagcggaacgcaggcgcgttcatcaaaagctccgctgtagattttggcacattccatgtgcaacactacagctccgccttttgatatgcacaaaagtggtgtcttaaa

SEQ ID NO: 16130 - RNA, 177 nt, unidentified
  source 1..177: mol_type = other RNA; note = Related to JAFZQQ010000087.1; note = Oscillospiraceae bacterium
tgtggaacattagcgcgcgtcaacatccgttggcaccgtcagcgagtcgctgccgggatgcagaaccactaggcattcactgcgtgaaatcgcagctactccactgtattacagcccacttcatgggcttaggaatacagctgcgtagctacaatgttctcaatgttttgttccaca

SEQ ID NO: 16131 - RNA, 176 nt, unidentified
  source 1..176: mol_type = other RNA; note = Related to SVKP01000140.1; note = Oscillospiraceae bacterium
cgtgaagcgttagtgtgggtcaacattcgttggcaccggcggcgagtcgccgccgggaggcgggactacagagtattcactgcgtgaaatcgcagccgctcactgtattagcgcccacttcatgggcttgagaatacagcgagacagctgccatattctcactgtattgctccacg

SEQ ID NO: 16132 - RNA, 179 nt, unidentified
  source 1..179: mol_type = other RNA; note = Related to JAFWAC010000028.1; note = Clostridia bacterium
agcggaacattagcgcaagtcaatatctacattggcaccgacagcgagtcgttgttgggatgcatgcttcaaaagcattcacttcgttcattcgaagttgactacactgtatttaagcccactttatgggctaaggatacagcttcgcaacttcgatattctcattgttttgttccgca

SEQ ID NO: 16133 - RNA, 180 nt, unidentified
  source 1..180: mol_type = other RNA; note = Related to JAFQMR010000111.1; note = Clostridia bacterium
tgcgaagcatcagagcaagtcgatccccatcggcaccgaccgcgagtcgcagtcgggatgcaccgcctttaaaccgattcacttcgttcattcgaagacggctccgctgtatggaaacccattgcatgggttcaaaaatacagctttgccgcatcgaaattcacattgtcttgtttcgca

SEQ ID NO: 16134 - RNA, 176 nt, Flintibacter sp.
  source 1..176: mol_type = other RNA; note = Related to NZ_JACOPN010000001.1
tgtggaacattagcgcaagccagattttattggcaccggcagcgagtcgctgctgggaagcacagcttagtttgattcacttcgttcagcctaatctgctccgctgtataaaaggcacacgccgtgtgcttaaaatacagctgcgcagcttagcattcacattgttttgttccaca

SEQ ID NO: 16135 - RNA, 179 nt, unidentified
  source 1..179: mol_type = other RNA; note = Related to SVSR01000007.1; note = Oscillospiraceae bacterium
agtggaacataagagcaagtcaataaacattggcaccgacagcgagtcgctttcgggaagcagcatttacaagtattcactacgttcagacgaagttgactccgctgtatctaaaaggcccactgcgtgggctataatacagctacacaacatcgtaattcacattgttttgttccacg

SEQ ID NO: 16136 - RNA, 181 nt, unidentified
  source 1..181: mol_type = other RNA; note = Related to JAGBHE010000095.1; note = Clostridia bacterium
tgcagagcattagagcaagccttaatttaacggcgccgatagcgagtcgttatcggaaagcaaatatcaataaatattcactatgttcaaacgaagttgattacgctgtattcgggaagcccactgcatgggcctaaatacagcttcacaacatcgtaatacacatttgtattgctttgca

SEQ ID NO: 16137 - RNA, 178 nt, unidentified
  source 1..178: mol_type = other RNA; note = Related to JAFSXU010000033.1; note = Clostridia bacterium
tgcggaacaatagcgcaggtcaatgttcattggcgtcggcaacgagtcgttgtcggggagtagagtttacaagtattcacttcgttcagacgaagttgactccgctgtataaagatgcccacttcatgggctaaaatacagctacacaacatcgtaattcacaatgtattgtttcgca

SEQ ID NO: 16138 - RNA, 183 nt, unidentified
  source 1..183: mol_type = other RNA; note = Related to JAFYQP010000074.1; note = Clostridia bacterium
aacgggacattagcgcaagtcaatttttaccattggcaccgacggcgagtcgctttcgggatgcagtattcaatgagattcagtaccttcagccgaagcgtgctacattgtataaaaaagcccacgccaggtgggctatgatacaactccgcagcttcgtgatgtacattgttctgttccgta

SEQ ID NO: 16139 - RNA, 176 nt, unidentified
  source 1..176: mol_type = other RNA; note = Related to JAFPRS010000057.1; note = Clostridia bacterium
ttgcggaacatagcgcatgcgttgctttcagcgcgccgtcggcgagtcgccgccggaagccaatatgatcagacgaccgcttcgctcgaacggagcggctccgctgaattgccgcccacttcatgggctataatattcagcttcgcagcccgttctgctcaatgtatgttccgaaa

SEQ ID NO: 16140 - RNA, 178 nt, Ruminiclostridium sp.
  source 1..178: mol_type = other RNA; note = Related to JAFQUH010000074.1
tgcggaacatcagagcaggtcggtttacatcgacaccggcggcgagtcgccgtcgggaagcagcatttccacctattcacttcgttcacccgaagctgactccgctgtatttatgcccacggtgtgggcaagaaatatacagcttcgcatctgcggattcacattgtcttgttccgcc

SEQ ID NO: 16141 - RNA, 175 nt, unidentified
  source 1..175: mol_type = other RNA; note = Related to JAFQPT010000004.1; note = Oscillospiraceae bacterium
gaacattagagcaagtcaatttccattggcacctgcagcgagtcgctgtggggatgcattaccatgatcgatgcacgcaagtgcaatcgaagctgctgcgctgtatttcagcccactgtcatgggctcgggtatacagcttcgcatcttcggtattcacattgtattgttctgca

SEQ ID NO: 16142 - RNA, 178 nt, unidentified
  source 1..178: mol_type = other RNA; note = Related to JAFUPP010000033.1; note = Clostridia bacterium
cacggaacataagcgcaggtcaattatcattggcaccgacagcgagtcgcggtcgggacagcaatatcagtatagtttcgctttgctcaagcgaatctgtttaagcagtatttaagcccacatacatgggctcagtatacagctacacatcttcgtattcacattgttttgttccgta

SEQ ID NO: 16143 - RNA, 179 nt, unidentified
  source 1..179: mol_type = other RNA; note = Related to JAFPOZ010000331.1; note = Clostridia bacterium
tgtgaggcattagtgaacgtcaatttcttgacagctgcggcgagtcgctgcggtcagacatatacctttgatagtcgcttcgctccggagaagctgactgcgcagtatacgggcccatgttccatgggctggaggatactgcttcgcatcttctcgatgcgcattagtattgcctcaca

SEQ ID NO: 16144 - RNA, 180 nt, unidentified
  source 1..180: mol_type = other RNA; note = Related to JAFZOL010000002.1; note = Clostridia bacterium
ggcggaacgtaagcgcagacccgtttttttacggcgccggccgcgagtcgcggtcggtacgcggcatccccgcaggattcgcttcgctcaatcgcgttcgcttcgctgtattgcagcccgcttcacgggctcagagatacagctcgcaacggcgatatgctttttcagttacgttccgcg

SEQ ID NO: 16145 - RNA, 181 nt, unidentified
  source 1..181: mol_type = other RNA; note = Related to JAFURU010000174.1; note = Clostridia bacterium
aacggaacataagagcaagtcaatatacgttggcaccgtgggcgggtcgccctcgggaagcaggcaaaagatacggggctcacttcgttcggacgaaagcggctaagcagtatgaaaatgcccaccttgtgggcccgaatactgcaccgcgcttccgtgattcacattgttttgttccgta

SEQ ID NO: 16146 - RNA, 176 nt, unidentified
  source 1..176: mol_type = other RNA; note = Related to JAFTEJ010000045.1; note = Clostridia bacterium
tgtggaacactagagcaagtcaatcatcattggcaccggcagcgagtcgctgtcgggaagcatttcaacgaggggctcgcttcgctcgatcgaagctgcttcactgtgttttggggcccacgttgtgggcttaaacacagctcacatcttcgagatacacactgttctgttccaca

SEQ ID NO: 16147 - RNA, 177 nt, unidentified
  source 1..177: mol_type = other RNA; note = Related to JAFQEI010000172.1; note = Clostridia bacterium
tacggaacattagcgcgagccggttttcacaggcaccgacagcgagtcgccgtcgggatgcagtatccatcaggattcacttcgttcaaccgaagctgattccgctgtatttcagcccacttcatgggcttgggatacagctgcacatcttcgtgatccacattgttttgttccgtg

SEQ ID NO: 16148 - RNA, 167 nt, Butyrivibrio sp.
  source 1..167: mol_type = other RNA; note = Related to JAGAYD010000015.1
tgcggaactctagcgcagctggcaaacgtcggcacgagtggcgagtcgttactcggaaaagaactatgtagcattataattgtagctgttccactgtagtgaaatgcacgcttcacgtgctagactacagctccacagcaacaatattcttactgttttgttccgca

SEQ ID NO: 16149 - RNA, 167 nt, Butyrivibrio proteoclasticus
  source 1..167: mol_type = other RNA; note = Related to FOXO01000040.1
agcggaactctagcgtagtcaacaaacgttggcacgagtagcgagtcgttactcggaaaagatatttgtaacattataatagcagctgttccactgtagtaggaggcacgcttcacgtgctaaactacagctccacagcagcgatattcttactgttttgttccgct

SEQ ID NO: 16150 - RNA, 168 nt, Eubacterium sp.
  source 1..168: mol_type = other RNA; note = Related to JAGBKD010000016.1
agcggaactctagtgtagtcggcatacgtcggcacgaatgacgagtcgttattcggaaagagtgattagtaccattttaattgcagctgtttcactgtagcaggaggcacgcttcacgtgcttaactacagctccgcagcagcgatattcttactgttttgttccgct

SEQ ID NO: 16151 - RNA, 169 nt, unidentified
  source 1..169: mol_type = other RNA; note = Related to JAFOYD010000138.1; note = Lachnospiraceae bacterium
aacggaactttagtgcagtcagctgacgttgacacggacagcgagtcgttgcccggaagtaaatcctgattacattattatcgccactgctccaacgtagttttgggcacgctgccacgtgcttctctacgcctgcgcagtagcaatattctaactgtattgttccgga

SEQ ID NO: 16152 - RNA, 180 nt, Pseudobutyrivibrio sp.
  source 1..180: mol_type = other RNA; note = Related to FOWB01000004.1
tgtagaactatagtgcagtcaacttacgttggcacgagcagcgagtcgttgttcggatgtatatcatagtttgttttaatagatactgctccaacgtagtggaggcacgccgaagtgtaccacttcaacgtgctgctctacgcctacgcagcatcgatattcttactgtatggttctacg

SEQ ID NO: 16153 - RNA, 178 nt, unidentified
  source 1..178: mol_type = other RNA; note = Related to JAFQLL010000109.1; note = Clostridia bacterium
aacggagcattagtgtatgtcaattttaattggcaccgacagcgagtcgttgtcgggacaagttaagtaaaagtattcgcgcactcagctgaaacagctgtgactgtataaaaatgcccacttcatgggctcatatacagccacatcagcttcatgattcgcattgttttgctccgta

SEQ ID NO: 16154 - RNA, 172 nt, unidentified
  source 1..172: mol_type = other RNA; note = Related to JAFUOO010000022.1; note = Clostridia bacterium
aacggagcattagtgtaagcctattggcaccgacagcgagtcgttgtcgggacaaggttagtaaaagtattcacgagttcagctgaaacagctgtggcagtataaaaaggcccacttcatgggctcatatacagccacatcagcttcatgattcgcattgttttgctccgta

SEQ ID NO: 16155 - RNA, 177 nt, unidentified
  source 1..177: mol_type = other RNA; note = Related to JAFXHP010000039.1; note = Clostridia bacterium
agcagagcattagtgtatgtcaaaccttgtttgacgcctcgggcgagtcgccccgggttacataaaaataaaaaaagtcacttcgttccatccatgtggtgccgctgtaatattgcccacttcatgggccgaaagttacagcttaccacaaaagattttctcatgttttgctctgcg

SEQ ID NO: 16156 - RNA, 203 nt, unidentified
  source 1..203: mol_type = other RNA; note = Related to JAFYHQ010000006.1; note = Erysipelotrichaceae bacterium
agcagaacatcagtcataatcgatgcaggcattacctgccgataccgtcagcgagtcgctgccgggaaatgaaaaccaagctcaattgcttcgcaaatgagttgtctcggaagcaggtcactacactgcgttcgttcacgaactcactccatgtagattcctactgcatcctcgaaactcatattctcaagtcttgttctgct

SEQ ID NO: 16157 - RNA, 212 nt, unidentified
  source 1..212: mol_type = other RNA; note = Related to JAFRKA010000015.1; note = Erysipelotrichaceae bacterium
agcagaacatcagtcatgttcgatgaggagaccacaagtcaatcaagtcgataccgtcagcgagtcgttgccgggatatgaaaacttaattaatttgcttcgcaaatgaattgtctcggaagcattaaactacactccgttcgttctcgaactcactccatgtagacgcttcatgctccctcgaaattcatatactcaagtcttgttctgct

SEQ ID NO: 16158 - RNA, 203 nt, unidentified
  source 1..203: mol_type = other RNA; note = Related to JAFYHQ010000014.1; note = Erysipelotrichaceae bacterium
agcagaacatcagccatgatcggcgtaggtttgatcccgccgtaccgtcagcgattcgttgccgggaaatgaacacacagtattcttgcttcgcaaatgggttgtctcggatgtaggtttgtacactccgttcgttcacgaactcactccatgtacctcactactacaccctcgaaacccctattctcaagtcttgttctgct

SEQ ID NO: 16159 - RNA, 211 nt, unidentified
  source 1..211: mol_type = other RNA; note = Related to JAFRQF010000031.1; note = Erysipelotrichaceae bacterium
agcagaacatcagtcatattcgatgagaagaattatttcaatccttgtcgataccgtcagcgagtcgttgccgggatatgagcatcaatcatcattgcttcgcaaagaagttgtctcggaagcaggtaactacactgcgttcgttcacgaactcactccatgtagcccctgctgcatcctcgaaacttctattctcaagtcttgttctgct

SEQ ID NO: 16160 - RNA, 174 nt, Solobacterium sp.
  source 1..174: mol_type = other RNA; note = Related to JAFUCV010000276.1
tgcagaacagcagcgcagttcatcttcacgatgacaccgtatgcgcgtcgcatacgggatgcacataaccgatacagtcacatgttccattccggtactgcactgcagtgagagcacacttcatgtgccatcctgcaattccgtatccgaaatattctcaggtgctgttctgct

SEQ ID NO: 16161 - RNA, 189 nt, Eubacterium ventriosum
  source 1..189: mol_type = other RNA; note = Related to DS264270.1
tgcagtgcattagtgcatttcaattttatattgaagtcaatagggagtcgctattgatagttattaatacagtttgtattcgataaaatcgaatacaccatagaatctttgctcgatgtaggtggagcacattacatgtgctagactacatctgcgccagtttctaaattctcaatgttttgcattgca

SEQ ID NO: 16162 - RNA, 176 nt, unidentified
  source 1..176: mol_type = other RNA; note = Related to JAFTAK010000098.1; note = Clostridia bacterium
gccgaacatcagagcaagccaactaacgtcggcacccgcggcgagtcgccgcggggaagcatcaaccctgatccgcgcctgcggcgcgctcacagccgctccgctgtatgaattgcccactaccatgggctgtaatacagctccgcgcctgagaattcacactgtcttgcttcggc

SEQ ID NO: 16163 - RNA, 189 nt, unidentified
  source 1..189: mol_type = other RNA; note = Related to SVBR01000043.1; note = Erysipelotrichaceae bacterium
cggattgcaccagtgtgatccggttttggccggtaccgtcagcgagtcgctgccgggatacagtttggccagggttcgccttcggctcaattcctgatgctcgcagcagaacagcacacgtcccgtgtgcacgcccttacgggctgccctgcagctgcgcttcagaatattctcaagtggtgtcagaag

SEQ ID NO: 16164 - RNA, 193 nt, Solobacterium sp.
  source 1..193: mol_type = other RNA; note = Related to JAFUHN010000140.1
gaaaacgcaccagcgttactccggcaatgccggtaccgtcagcgagccgctgccgggatgacagtccgctgaagcttcgccttcagctcaattcctgatgctcgccgcagtacagcacacgtcccgtgtgcacgccccgtaaaggggctgaactgctgctgcgcttcagaatattctcaagtggtgcagtaaa

SEQ ID NO: 16165 - RNA, 175 nt, unidentified
  source 1..175: mol_type = other RNA; note = Related to DPVX01000340.1; note = Erysipelotrichaceae bacterium
aaaacagcaccagcgtaacgtcattgcaaaatgacaccgtcagcgagtcgctgccgggatacgaaaacataaaatatgcgcatggcgcagttcctgtgctcgcagcagtacagcccatttcatgggtcccggaactgcagctgcgcgcagaaacattcgcaagtggtgctttgga

SEQ ID NO: 16166 - RNA, 189 nt, unidentified
  source 1..189: mol_type = other RNA; note = Related to JAGCGE010000004.1; note = Clostridiales bacterium
agcagagcaatagagcaagtcagctaattactgacgccggccgcgagtcgcagtcggagaagaaccaccgaggagtaagtaacgtgaacgttacttacaggtatcgaatcttcttcaatgaataagaattaacttcgttaatgtaaattcacttcagaatcttcgatattgatattgtattgttctgcg

SEQ ID NO: 16167 - RNA, 138 nt, Eubacterium sp.
  source 1..138: mol_type = other RNA; note = Related to JAFWKC010000096.1
cagtcggcggcagaagattgaaatgacgtgttttcgtttcaggcgagtgcgagtcgtgctcgttaaataaaagtccaacaaagcgatgaacattagcattgcttcgcaatgcaaactatactcaggtgccgccggctg

SEQ ID NO: 16168 - RNA, 138 nt, unidentified
  source 1..138: mol_type = other RNA; note = Related to DOBY01000149.1; note = Oscillospiraceae bacterium
aggtcggcggcagcagatttaagtaatctttttacttaaggcaggagcgagtcgctgctgttaaacaaatttatttcgtgtgccgaatgcctcgtgcaatttcattgcacaacaaataacactaagtgccgccgaccg

SEQ ID NO: 16169 - RNA, 126 nt, unidentified
  source 1..126: mol_type = other RNA; note = Related to SVKT01000009.1; note = Oscillospiraceae bacterium
agacgaagcgtagcctttgcttgattacgatccgctcgagcaggtgtggcgagtcgccacgctacgacagtatttgtgaacgatgcgcgaatcccttcgcgctaccttcggcagtacgcttcgtct

SEQ ID NO: 16170 - RNA, 126 nt, unidentified
  source 1..126: mol_type = other RNA; note = Related to JAFXTM010000067.1; note = Oscillospiraceae bacterium
gcggtgaagatagcgtaattcctgccatcgcgcggggagagcagcgagtcgctgttctgttttttaagcccgacacccgaatctgcttcgcaattcggcactgaagaataaaggtgtcttcaccgc

SEQ ID NO: 16171 - RNA, 150 nt, unidentified
  source 1..150: mol_type = other RNA; note = Related to JAFTYM010000022.1; note = Oscillospiraceae bacterium
cagggagcggcagccgcgctttcttccgtaaaaagatgagggcaaggtgggcgagtcgccctccgtgagcttaattcagtgaggtccgcaaacgtacccgtttgcgctctcaagcttcgcttgagacattaatttttgtgccgcttcctg

SEQ ID NO: 16172 - RNA, 151 nt, unidentified
  source 1..151: mol_type = other RNA; note = Related to JAFQMH010000077.1; note = Oscillospiraceae bacterium
cagggagcggcagccgcgctttcttcccaaaaagctgaaagtaaggtgggcgagtcgccctccgagagattttttgagtgaggtccgcaaacgtttaccgtttgcgctctcaagctacgcttgagacaacagatttttgtgccgcttcctg

SEQ ID NO: 16173 - RNA, 174 nt, unidentified
  source 1..174: mol_type = other RNA; note = Related to NZ_LT835157.1; note = Proposed Anaeromassilibacillus sp.
gacggaacaacagcgctaaccatgtgatgcatacatggctggacggcgagtcgccctccagaaagatgactttggaaaaagaggcatgcggccttcgccgtgtcaagatacacaaggtgtattcccacacggctatgcccgcatcccttcaggaacaatttgtgttgttccgtc

SEQ ID NO: 16174 - RNA, 177 nt, unidentified
  source 1..177: mol_type = other RNA; note = Related to NZ_JADNJD010000005.1; note = Proposed Anaeromassilibacillus sp.
ggcgggacaacagcgctttccgtggccattgtcagcacggctggccggggagtcgccggccaataggatatctgggcagaaagaggcatgcgggattcgccgtgtaatcgatacactgcgtgtattcccacacggctgtgcccgcatcccttcaggtgtttgatgtgttgccccgcc

SEQ ID NO: 16175 - RNA, 176 nt, unidentified
  source 1..176: mol_type = other RNA; note = Related to NZ_LN868536.1; note = Proposed Anaeromassilibacillus senegalensis
gacggggcaatagcgtcttccgcctcccgcgcggcagcccggcgagtcgccgggccggacagtcattcccgattccgggagaaaaacaagcctcgccgtgttccggatacactgcgtgtatcaatagacacggctgcggttgcatttctaaatgaagttttttgtattgccccgtc

SEQ ID NO: 16176 - RNA, 192 nt, unidentified
  source 1..192: mol_type = other RNA; note = Related to CP042469.1; note = Clostridiales bacterium
acgaaagcgatagcgaatcttacagagacactctctgtgagcgggcgttgagtcgacgcctgtatcccgaaatccgaagatcgcagcctgcggcagcgataaaaattctgtcctcaccgtgctctggctacatttcatgtaggtctgcacggctgtgggtgaattttacgagagtttttgtatcgctttcgt

SEQ ID NO: 16177 - RNA, 185 nt, Clostridium sp.
  source 1..185: mol_type = other RNA; note = Related to VFMF01000001.1
gcggaaacggcagcagattctgcggatttttttcgcaggaggacggcgagtcgccgcccccgaaagggtaaaaggacctgcgctgcgcgcgcagaaagcaatcctcaccgtgtaaccatacacttcatgtattttaaaacacggctgcggttgcattccgaaggaagattttgtgccttttccgc

SEQ ID NO: 16178 - RNA, 161 nt, Oscillibacter sp.
  source 1..161: mol_type = other RNA; note = Related to JAFXOM010000274.1
ggcggggcggcagtctacaccgcgcttccacgtgcgggcgtccgcgagtcgcggccgcagcttattctcccgtcactttgtcgcgttccacgctccggttccttcggaaccccgttccttgcggaacgcagcttcgctgtctttttttgtgccgccccgcc

SEQ ID NO: 16179 - RNA, 136 nt, Flavobacterium sp.
  source 1..136: mol_type = other RNA; note = Related to NZ_QNVY02000005.1
ttaaaagaaatttgttggcttatgctagcgacggaaccgtgagtcactgttctgtaattgaatgttctttcaagcaccaggtttaaaagattctccgcagagctccgaacttttaaaccggtattcttaattgggg

SEQ ID NO: 16180 - RNA, 136 nt, Flavobacterium sandaracinum
  source 1..136: mol_type = other RNA; note = Related to NZ_SMFN01000003.1
ttaaaagaaatttgttagcccaggttagcgatggagccgtgagtcactgttctgtaattgaatgttctttcaagcaccaggtttaaaagattctccgcagagctccgaacttttaaaccggttttcttaattggga

SEQ ID NO: 16181 - RNA, 136 nt, Flavobacterium sinopsychrotolerans
  source 1..136: mol_type = other RNA; note = Related to NZ_FODN01000006.1
ttaaaataaatttgttagccctggttagcgacggagccgtgagtcactgttctgtaattgaatgttctttcaagcaccaggtttaaaagattctccgcagagctccgaacttttaaaccggttttcttaattggga

SEQ ID NO: 16182 - RNA, 135 nt, Flavobacterium ranwuense
  source 1..135: mol_type = other RNA; note = Related to NZ_SMLH01000005.1
tcaaagaaatttgttagcccaggttaacatcggagccgtgagtcactgctctgtaattgaatgttctttcaagcaccaggtttaaaagattctccgcagagctccaaacttttaaaccggtattcttaatcgggg

SEQ ID NO: 16183 - RNA, 135 nt, Flavobacterium sp.
  source 1..135: mol_type = other RNA; note = Related to NZ_JQMS01000001.1
tcaaagaaatttgttagtctaggctagcgacggaaccgtgagtcactgttctgtaattgaatgctctttcaagcaccaggtttaaaagattctccgcagagctccgaacttttaaaccggtattcttaatcgggg

SEQ ID NO: 16184 - RNA, 135 nt, Flavobacterium sp.
  source 1..135: mol_type = other RNA; note = Related to NZ_JSYM01000001.1
ccaaagaaatttgctagtttaggctagcgacggagctgtgagtcactgttctgtaattgaatgctctttcaagcaccaggtttaaaagattctccgcagagctccgaactttcaaaccggtattcttaattgggg

SEQ ID NO: 16185 - RNA, 133 nt, Flavobacterium caseinilyticum
  source 1..133: mol_type = other RNA; note = Related to NZ_SMFM01000002.1
ctagaaataaatttgtttacgttagaatcggagccgtgagtcactgctctgtaattgaatgttctttcaagcaccaggtttaaaagattctccgcagagctccgaacttttaaacctgtattcttaattgggg

SEQ ID NO: 16186 - RNA, 133 nt, Flavobacterium aquariorum
  source 1..133: mol_type = other RNA; note = Related to NZ_QKXH01000002.1
tcccaaagagctgttagtgtaggctaacaacggagccgtgagtcattgctctgtaattgaatgctttttcaagcacaggctttaaaagatctccgcggagctacgaccttttaaacctgtttcttaattgggg

SEQ ID NO: 16187 - RNA, 134 nt, Flavobacterium sp.
  source 1..134: mol_type = other RNA; note = Related to JAHWYN010000011.1
ccataaagagctgttagtatgttactaacaacggagccgtgagtcactgctctgtaattgaatgctttttcaagcacaggctttaaaagatcttcgcagagctacgaccttttaaacctgtttcttaattggga

SEQ ID NO: 16188 - RNA, 136 nt, Flavobacterium sp.
  source 1..136: mol_type = other RNA; note = Related to JAGGNA010000001.1
ctcaaacagttcatttagctgaggctaatgacggagccgtgagtcactgttctgtaattgaatgctttttcaagcaccaggtttaaaagattctgcgcagagctccgaacttttaaaccggtattcttaattgggg

SEQ ID NO: 16189 - RNA, 136 nt, Flavobacterium xinjiangense
  source 1..136: mol_type = other RNA; note = Related to NZ_FRCL01000005.1
ctcaaagaactcacatagccttggctagtgacggaaccgtgagtcactgttctgtatttgaacgctttttcaagcactaggtttaaaagatcctccgcagagctccgaacttttaaaccggtattcttaattgggg

SEQ ID NO: 16190 - RNA, 135 nt, Flavobacterium frigoris
  source 1..135: mol_type = other RNA; note = Related to NZ_FOFZ01000005.1
tttaaagattgtgttagctcagctaacatcggagcagtgagtcactgttctgtaattgaatgctttttcaagcactgggtttaaaagatcctccgcagagctccgaaccttttaaacccgtattcctaattggag

SEQ ID NO: 16191 - RNA, 135 nt, Flavobacterium degerlachei
  source 1..135: mol_type = other RNA; note = Related to NZ_FNMV01000002.1
tttaacgattttgttagcttagctaacatcggagcagtgagtcactgttctgtaattgaatgctttttcaagcactgggtttaaaaggccctccgcagagctccgaaccttttaaacccgtattcctaactggag

SEQ ID NO: 16192 - RNA, 134 nt, Flavobacterium granuli
  source 1..134: mol_type = other RNA; note = Related to NZ_PVUB01000001.1
tctaaagattgtgttagctcagctagcgtcggagccgtgagtcactgttctgtaattgaatgttctttcaagcactggtttaaaaggctctacgcagagctccgaaccttttaaacccgtattcctaatgggag

SEQ ID NO: 16193 - RNA, 136 nt, Flavobacterium soyangense
  source 1..136: mol_type = other RNA; note = Related to NZ_JADHEC010000014.1
ttccaagatttcatcagcattagctgatgaggagtcgtgagtcacaactctgtaattgaatgctttttcaagcaactatgtttaaaaggatctccgcagagctccgaaccttttaaacccgtgttcttaactggag

SEQ ID NO: 16194 - RNA, 136 nt, Flavobacterium sp.
  source 1..136: mol_type = other RNA; note = Related to PNNA01000057.1
cctgaaaatttcatcgacagtggtcgatgaggagtcgtgagtcactactctgtaatggaatgctttttcaagcaactgtgtttaaaaggatctccgcagagctccgaaccttttaaacccgtgttcttaactggag

SEQ ID NO: 16195 - RNA, 138 nt, Epilithonimonas hispanica
  source 1..138: mol_type = other RNA; note = Related to NZ_QNUG01000026.1
ttaaaatattgtgatggtttcgaccacacctgagccgtgatgtcattgctcagtaattgaataggctttcaagccttcgtgtttaaaaggattccgctgaagctccacccttttaaacccgtattcactaatttgagt

SEQ ID NO: 16196 - RNA, 139 nt, unidentified
  source 1..139: mol_type = other RNA; note = Related to JACPUU010000004.1; note = Bacteroidetes bacterium
ttaaaataacgtgtcggtttcggccggcacctgagttgtgagtcactgctcagtaattgaatgggctttcaagctttcgggtttaaaaggggttccgctgagctccaccccttttaaacccgtattcactaatttgagc

SEQ ID NO: 16197 - RNA, 139 nt, Zobellia uliginosa
  source 1..139: mol_type = other RNA; note = Related to NZ_FTOB01000002.1
tcaaaatattgtatcagtttcggctgataccggagccgtgagtcactgctctgtaattgaatgggctttcaagctctcgggcttaaaaggggttccgcagagctgcaccccttttaagcccgtattcactaatttgagt

SEQ ID NO: 16198 - RNA, 139 nt, Cecembia lonarensis
  source 1..139: mol_type = other RNA; note = Related to NZ_AMGM01000138.1
ttaaaatattgtgttgacttcggttggcaccggagcagtgagtcactgttctgtaattgaatgggttttcaagccttcgggtttaagcggggttccgctgaggctccaccccgcttaaacccgtattcactaattgagt

SEQ ID NO: 16199 - RNA, 138 nt, unidentified
  source 1..138: mol_type = other RNA; note = Related to NZ_CP083760.1; note = Candidatus Sulfidibacterium hydrothermale
taaaagttttgtgttggctgtgctaacaccggaatagtgagtcactattctgtaatggaatgggctttcaagccttcgggtttaaaagggctgccgctgaggctccagcccttttaaacccgtattcactaacttgag

SEQ ID NO: 16200 - RNA, 138 nt, Flavobacterium oncorhynchi
  source 1..138: mol_type = other RNA; note = Related to NZ_MUHA01000018.1
taaatagtttgtgttaatgtaaattaacaccggagccgtgatgtcactgttctgtaattgaatgctttttcaagccataaaattttaaagcttctccgcagagctcctaagctttaaaatttttattcatatttgagt

SEQ ID NO: 16201 - RNA, 139 nt, Flavobacterium sp.
  source 1..139: mol_type = other RNA; note = Related to MQTN01000055.1
taaataattagtggcatcaatataattgatgttgggtcaatgagtcattgccctgtaagtgaatgctttttcaagcatgcgataacaaatttcctcaaaaggatttgagaaaatttgttatcgctattcctaatttgag

SEQ ID NO: 16202 - RNA, 138 nt, unidentified
  source 1..138: mol_type = other RNA; note = Related to JADJAG010000004.1; note = Chitinophagaceae bacterium
ttgagatacttcttcaacttcggctgaagacggagcagtgagtcactgttctgtaaatgaatgggctttcaagcatcagggcgaaaagcttctccgccagagctccgaagcttttcgccctgtatcgataatttgagt

SEQ ID NO: 16203 - RNA, 124 nt, Citrobacter freundii
  source 1..124: mol_type = other RNA; note = Related to QFQQ01000035.1
tcattctgacttgcctttaggccggcttggcgagtcgtcaagctgtaagagaataacctttcgagctgtggggggtgtgacggtccgcaagtttcgctccgctgcgctacgctcaacattgcgc

SEQ ID NO: 16204 - RNA, 150 nt, Sphingobacterium spiritivorum
  source 1..150: mol_type = other RNA; note = Related to NZ_UGYW01000002.1
gtaaagttatttatatcatttataaggtgtagcgagtcgttatgctgtagaagaatgaactttcaagcttacaggtggaaagaagcgtcaaagtttgcctcgttcctcagcaaacatttgccacttctttccacctttgtcgataggctc

SEQ ID NO: 16205 - RNA, 156 nt, Pedobacter sp.
  source 1..156: mol_type = other RNA; note = Related to NZ_JAFEWD010000003.1
tgaaagagttttccgtttaggataaagaaactgggtggtgagttcacctccccggatggtgaatagcttttcaagcttggaagcgaacaagaggaaccgaaagcctcctccgtgcctcccccggcatttcgctccctcttgttcgctttgttcaaa

SEQ ID NO: 16206 - RNA, 159 nt, Mucilaginibacter sp.
  source 1..159: mol_type = other RNA; note = Related to JACHBZ010000008.1
acagaagatatgcctggtgtattccaggagggatgatgagttcgtcattcccagttgagaaaaggctttcgagccttagcgacaaacataaaccgggagcctccgcctacggcctgcccccggcatcccgcttcatgtttgccgctttgttcaatgggc

SEQ ID NO: 16207 - RNA, 164 nt, Pedobacter zeae
  source 1..164: mol_type = other RNA; note = Related to BMHZ01000001.1
tctgaagaaattgctctagtattctagaagccggaagggtgtagtcacctattctgtaagtgaacaggctttcaagcttgtgcattaaacataaatcaaaagtctccccctaaagggctccgccgacattttgcttcacgtttaatgcattgttttaatggggc

SEQ ID NO: 16208 - RNA, 162 nt, Olivibacter domesticus
  source 1..162: mol_type = other RNA; note = Related to NZ_FOAF01000001.1
ttaaaataattcccccggttttccggggcgggtggatgttgtcatcccccttgtaagtgaacaggctttcaagcttgtggattaaacataaaccaaaagtctcctccccaaaggggcccctccgacattttgcttcatgtttaatccattgtttaaaggagc

SEQ ID NO: 16209 - RNA, 166 nt, Chitinophaga sp.
  source 1..166: mol_type = other RNA; note = Related to QGTG01000019.1
taaaataattgctctagtgtgtctagaagccggagggatggagtcatcctctctgtaagagaacaggctttcaagcttgtgcattaaacgtaaatcaaaagtctccttccccagaggggccccttccgacattttgattcacgtttaatgcattgtttaagatggg

SEQ ID NO: 16210 - RNA, 139 nt, Zhouia spongiae
  source 1..139: mol_type = other RNA; note = Related to NZ_CP094326.1
ccaaacggagcttgatttttaaaagaaatggctggtgaagtcacctgtccaaatagtgaaccttctttcaagctagcgaattttgaaaaggcaaaatcggagatatttccctttccaaaattcttattccgaacggggg

SEQ ID NO: 16211 - RNA, 138 nt, Pareuzebyella sediminis
  source 1..138: mol_type = other RNA; note = Related to NZ_VTZS01000003.1
ccaaacagagcttgatttttaaagaattggttggtgaagtcaccattccaaatagtgaacattctttcaagctagcgaattttgaaaaggcaaaatcggagatatttcccttttcaaaattcttattccgaacagggg

SEQ ID NO: 16212 - RNA, 140 nt, Aquimarina agarivorans
  source 1..140: mol_type = other RNA; note = Related to NZ_AFPB01000170.1
ccagacagagcttgatttttaaaagaaatggttggtgatgtcaccatgccaaatagtgaacattctttcaagctggcgaattttgaaaaggcaaaatcaatagatatttccctttccaaaattcttattccgaacggggg

SEQ ID NO: 16213 - RNA, 147 nt, Bizionia argentinensis
  source 1..147: mol_type = other RNA; note = Related to NZ_AFXZ01000051.1
tcaaacagagcttgatttttaaaacttcaaaaaaaatggtcggtggtgtcacctttccaaatagtgaatattctttcaagcaagcgaattttgtaaagacaaaatcagagatatttgcctttacaaaattcttattccgaacggggg

SEQ ID NO: 16214 - RNA, 150 nt, unidentified
  source 1..150: mol_type = other RNA; note = Related to NZTP01000067.1; note = Proposed Altibacter sp.
tcaaaatgcacttgatttttgaatccaaaaataaaatgggtagtgaggtcactttcccaattagtgaacttagtttcaagcttataagtgcttataagaagttaaaatcggagattattaacttcttaacgcacttattccgaacggggg

SEQ ID NO: 16215 - RNA, 151 nt, Tenacibaculum sp.
  source 1..151: mol_type = other RNA; note = Related to JABXHT010000059.1
tcaaaatgaaattcatttttgaatcctaaagaaattggatggtgacgtcacctacccgtatagtgaacataatttcaagcttaaggagcttttaaaatttaaaatccagtaggtatttaaatttcaaaatctcctttattccgaacggggg

SEQ ID NO: 16216 - RNA, 148 nt, unidentified
  source 1..148: mol_type = other RNA; note = Related to PAVO01000044.1; note = Crocinitomicaceae bacterium
tcaaaatgaaatccatttttagctcaataaaattcgggtggtgatgtcaccgacccttgttgagaacattatttcaagcttaagcagcttttaaaatttaaaatcagagatatttaaatttcaaatgctgctttattccgaacggggg

SEQ ID NO: 16217 - RNA, 153 nt, Kaistella gelatinilytica
  source 1..153: mol_type = other RNA; note = Related to NZ_JADPVI010000001.1
ccaaaataaattaaatttttaatttaataagggcagtgattcactcgtccctaccttgggaacaaaatttcaagcttaacgagctttagctcattgaaatcttcccaaaacctcagaatttcaatgagctaaatctcatttttccgtttggga

SEQ ID NO: 16218 - RNA, 152 nt, Chryseobacterium endalhagicum
  source 1..152: mol_type = other RNA; note = Related to NZ_JAELVM010000001.1
ccaaagcaaaatctttttttaaaaatatggggatgtgatgtcacataccctgatttgggaacataatttcaagctcaatgagcttgtaataaagcaaaatctccgctctgctacgatatttgctttattaaagctcatttttccgtttggga

SEQ ID NO: 16219 - RNA, 144 nt, Flavobacterium covae
  source 1..144: mol_type = other RNA; note = Related to CP013992.1
ccaaaatgaattatatttttaatgtaatatatgggaagtgagtcactaaccctaaattgggaactaaatttcaagctcaatgagcttgtaaataagcaaaatcaaagatatttgcttatttaaagctcatttttccgtttggga

SEQ ID NO: 16220 - RNA, 142 nt, Moheibacter sediminis
  source 1..142: mol_type = other RNA; note = Related to NZ_FWXS01000003.1
ccaaaataaattatatttttaatataatatgggatgtgagtcactaacccttatttgggaactaaatttcaagctcaatgagcttgtaactaagcaaaatctccgatatttgcttagttaaagctcatttttccgtttggga

SEQ ID NO: 16221 - RNA, 145 nt, Elizabethkingia miricola
  source 1..145: mol_type = other RNA; note = Related to CP040516.1
ccaaaataaattatttttttaaattaatataatgggaagtgagtcactaacccttatttgggaactaaatttcaagctcaatgagcttgtaactaagcaaaatctacgatatttgcttagttaaagctcatttttccgtttggga

SEQ ID NO: 16222 - RNA, 144 nt, Chryseobacterium sp.
  source 1..144: mol_type = other RNA; note = Related to NZ_CP075682.1
ttaaaagaattatctttttaaaaatattgggatgagatgtcttctaccccttattgggaacttattttcaagctcaatgagcttataacgtaacaaaatccagtaggtatttgttccgttaaagctcatttttccgctatggga

SEQ ID NO: 16223 - RNA, 153 nt, Tenacibaculum maritimum
  source 1..153: mol_type = other RNA; note = Related to CACSGR010000184.1
tagaaatgaacttcatttttaataaagaattaaggatggtgagtcacctacccagttagagaacgttctttcaagctaaacaaggcttgcaaagatttaattgatgaaaaatcaatataaatcttcacaatccttgtttattccgaacggggg

SEQ ID NO: 16224 - RNA, 146 nt, Polaribacter sp.
  source 1..146: mol_type = other RNA; note = Related to NZ_CP058984.1
tagaaatgaacttcatttttgataaagaataaggatggttagttacctacccaattagagaacattctttcaagctaaacaaggcttcacaaagatttaatcaaagatataaatcttcgcaaatccttgtttattccgaacggggg

SEQ ID NO: 16225 - RNA, 146 nt, Nonlabens ulvanivorans
  source 1..146: mol_type = other RNA; note = Related to NZ_JPJI01000026.1
ccaatagaaaagaacttgatttttagaattctgaatggtgagtcaccatttatttagagaacttactttcaagcaaaacaacttaaaataaagattcaatccgtaggtattcatcttttttttaagttgttttatcagaacggggg

SEQ ID NO: 16226 - RNA, 137 nt, Trichodesmium erythraeum
  source 1..137: mol_type = other RNA; note = Related to JAGGDU010000099.1
tttatggaagtttaggtaaatttgtcgaaggtggcgaggtcgccatctgtttgagaacttgctttcaagctgtatcgtgtaaataaagggaaaatcaaagatatttccctttatttacactccatttatcgcgaaag

SEQ ID NO: 16227 - RNA, 134 nt, Ulvibacterium marinum
  source 1..134: mol_type = other RNA; note = Related to NZ_RBCJ01000001.1
ttaaagaatagtatgctttgcataccagattagtgagtcattaatctgtaaaagaactgaatttcaagctcatcaacttttcaaaaggcctccgagtacctccgaccttttgaaaagtttattccaaattgagc

SEQ ID NO: 16228 - RNA, 138 nt, Chryseobacterium jejuense
  source 1..138: mol_type = other RNA; note = Related to JAGIPR010000013.1
taaaaaataattatgtatgtttaacataccggattagtgaatcattaatctgtaaatgaactgaatttcaagctcatcaacttttcaaaaggcctccgtgtacctccgaccttttgaaaagtttattccaatttgagc

SEQ ID NO: 16229 - RNA, 138 nt, Chryseobacterium scophthalmum
  source 1..138: mol_type = other RNA; note = Related to NZ_FSRQ01000001.1
taataagaaaatagtatggtaacatactaggattagtgaagtcactaatctgaaaaagaactagttttcaagcttatcaagttttcaaaagatctccgttgacctccgaccttttgaaaactttattccaatttgagc

SEQ ID NO: 16230 - RNA, 137 nt, Kordia periserrulae
  source 1..137: mol_type = other RNA; note = Related to NZ_QBKT01000004.1
aaaaaataaaaaaaaagctatttttgtattggatatgcgagtcgtaatatctgtatagggaatataatttcagagcagttccgaatcaaatactcctccagagtcgtcgcatttgattcggccttccaaaatattgg

SEQ ID NO: 16231 - RNA, 132 nt, Maribacter caenipelagi
  source 1..132: mol_type = other RNA; note = Related to NZ_SNZW01000015.1
attaaaaaaagcttaaatttacgatggatgtacgagtcgtaccatctgtatagggaatttaatttcagagcagttccgaatcaaatactcctccagagtcgtcgcatttgattcggccttccaaaatactgg

SEQ ID NO: 16232 - RNA, 132 nt, Chryseobacterium aquifrigidense
  source 1..132: mol_type = other RNA; note = Related to NZ_VFPD01000001.1
ttaaaaatattttgtaattttacaatgatgtctgaagtcggactatcataatagggaatataaatttcgagcagttccgattcaaaagctacgccagagtctccgcttttgaatcggccttacaaatagggg

SEQ ID NO: 16233 - RNA, 148 nt, Prevotella pallens
  source 1..148: mol_type = other RNA; note = Related to JABZUV010000100.1
ataaaagatcaatttgtcccaaagggcaaacggttgtatgagtcatacagctgtattggtataagttttcaagcgtttcaggctgctaatgttattcaggcggtcagagcccgccttcacaacattagcgcctgatgtcagatgacaa

SEQ ID NO: 16234 - RNA, 156 nt, Prevotella sp.
  source 1..156: mol_type = other RNA; note = Related to NZ_HE999448.1
ttaaaataacatatcaatttgtcctagggggcaagcggttgtatgagtcatactgctgtataggtataaggtttcaagcgattcaggcttctaatgttgtttcagcggtcagagcccgcttccacaacattagagcctgatgtcagaagacaaaga

SEQ ID NO: 16235 - RNA, 145 nt, Prevotella loescheii
  source 1..145: mol_type = other RNA; note = Related to JADYUK010000009.1
atacaaaataaaataggtaactatttcggtggagcgagtcgctctttctgtactgagtatgtaatttcaagcttttgagccaatttgcttctcatgcgcccagaggtcgcattcccagcaaattgtctcaaatatcgaaaaatat

SEQ ID NO: 16236 - RNA, 127 nt, Bacteroides sp.
  source 1..127: mol_type = other RNA; note = Related to JACOOE010000015.1
tatatagcttaataaagcattgggaatgaagagtcttcattctttatcaggaatacaatttctagccttgcgacttaaagaactcctccagagtcgtcgtcctttaagtcgctgatcgtaaaatata

SEQ ID NO: 16237 - RNA, 135 nt, unidentified
  source 1..135: mol_type = other RNA; note = Related to SEFL01000207.1; note = Sphingobacteriales bacterium
ctagactaatgccgtactaatgtactaggaatggtgagtcatcattccgaaaagcgaactggctttcaagcacttcgggggctccgcccttccgccaaaggctccagggctacgcccccgttcaacaaggaggga

SEQ ID NO: 16238 - RNA, 129 nt, Mucilaginibacter gotjawali
  source 1..129: mol_type = other RNA; note = Related to JACHWX010000002.1
tgattaggatactggcgtaagcccgtgggaacggtgagtcactgttccaaaaagcgaactccttttcaagcttatctgtggaagtttgctccgctgagctacacaaacttccacagattccaatacagc

SEQ ID NO: 16239 - RNA, 142 nt, Oscillibacter sp.
  source 1..142: mol_type = other RNA; note = Related to NZ_WQOA01000003.1
tgatagcctttacactttcgggtgttggtgcgaagatgtcttcgcgccatgaatgaactgattttccagccccgcaacgaaattgtgcataagcgcgacggagcggcttctccacaatttcgttgcagccaccgcaaatgga

SEQ ID NO: 16240 - RNA, 142 nt, unidentified
  source 1..142: mol_type = other RNA; note = Related to JAFQBT010000084.1; note = Oscillospiraceae bacterium
ttgatagctttaacacttttgggtgttggttcgatgatgtcatcgtgctagtaatgaacttattttcaagccctgcaatgaaatagctttcgaagtcacgggagtgacttctgcatctatttcattgcagtcatcacaaata

SEQ ID NO: 16241 - RNA, 142 nt, Listeria newyorkensis
  source 1..142: mol_type = other RNA; note = Related to NZ_BJEY01000003.1
ctaatagtttttctgtgtttagagaagaacatatgcgtctgatttcagcgtgtataaagagaaccttgtttcaagctattcattaagaacatccaccacaagggattgtggagtctgttcttaatgaagtatatcgcaaaac

SEQ ID NO: 16242 - RNA, 145 nt, Listeria booriae
  source 1..145: mol_type = other RNA; note = Related to JAARWV010000001.1
ctaatagtttttctgagtttagagaagaacatatgcgtctgatttcagcgtgtataaagagaaccctatttcaagctattcattaagaacatccaccacaagggattgtggagtctgttcctaatgaaagtatatcgcaagagca

SEQ ID NO: 16243 - RNA, 137 nt, Bacillus cereus
  source 1..137: mol_type = other RNA; note = Related to NUVJ01000020.1
gtttgaggattttttgcaatgtgcagcgagtcgctgtgcaaatatggactgatttactagcccaagctttgaaagttataaacttgaaatgggaatttaaagtgttacaactttcaaaggagcgttctgaaaaacga

SEQ ID NO: 16244 - RNA, 126 nt, Enterococcus faecium
  source 1..126: mol_type = other RNA; note = Related to CP065770.1
ctagtttaatactccatatggagcatggtttagtgagttcgctaagctaaaaagaactgatttacaagcttacagcttaaagaattttcccttcggagaagaaaaaaatcctttaagctgatggaa

SEQ ID NO: 16245 - RNA, 138 nt, Paenisporosarcina cavernae
  source 1..138: mol_type = other RNA; note = Related to NZ_CP032418.1
ttagtattttgaccgaggtcagtatagcgattcgttatacactaatgaactgattttcaagcctgggacaaacgtaattcacggccgaagtcagagcttcgaacctttgaattacgtttgtcatagcataaattggga

SEQ ID NO: 16246 - RNA, 135 nt, Bacillus thuringiensis
  source 1..135: mol_type = other RNA; note = Related to NUJF01000002.1
agttagtattttgaccgaggtcacgtacagcgattcgttgtgctctagtggattgattttcaagcctagggactaaagtaattcaatcatgaaaacggagtttcaaatcttgaattactttagtcggaaagctga

SEQ ID NO: 16247 - RNA, 119 nt, Enterococcus faecalis
  source 1..119: mol_type = other RNA; note = Related to PJWF01000007.1
tagaaaacttgttttttatcctatttgtcgatttcgtcaagtagtaagagaatttgatttcaagctttgtaacaaataatttttctcaaggattcgaaaaacttatttgttacactagc

SEQ ID NO: 16248 - RNA, 125 nt, Ruoffia tabacinasalis
  source 1..125: mol_type = other RNA; note = Related to NZ_JACCEL010000030.1
ctagcaatttgataaaacttagttttatcctatttgatgatttcgtcaagtagtaagaggaaagagtttcaagctctaggatagataattttattcaaggattcataaaattatctatcctagga

SEQ ID NO: 16249 - RNA, 139 nt, Janthinobacterium lividum
  source 1..139: mol_type = other RNA; note = Related to FPKH01000001.1
ttgacatcagatctagtggcgcaagccactgaacggcgattcgccgttcttatgaaatgttagtttcaagccttatcatggacttgcctttccgccaggaggcgtcaagacaagtccatgatggccttcggccttaaac

SEQ ID NO: 16250 - RNA, 134 nt, Nitrosomonas sp.
  source 1..134: mol_type = other RNA; note = Related to JAHBZZ010000012.1
gcaccagacctttatagcgaaagctatggaatggcgattcgccattctgggaagaactgactttcaagccataccaagagaactaaattgtccacggagttgacaatttattctcttggtaagcctgatggctt

SEQ ID NO: 16251 - RNA, 129 nt, Herbaspirillum rubrisubalbicans
  source 1..129: mol_type = other RNA; note = Related to NZ_JWZY01000031.1
ctagaccttagtagcgaaagctacggatcggcgattcgccgttctaggaagaacttactttcaagccattactgaaggttcgaccaatccgtcggagacggcttggccaaaccttcaggagccttcggc

SEQ ID NO: 16252 - RNA, 138 nt, Paenibacillus yonginensis
  source 1..138: mol_type = other RNA; note = Related to NZ_CP014167.1
ttagactttatgtggtttatccacaggtttgacgagtcgtcaagctaagaagaaccttatttactagccttagtgacaataactttcccttccgccagagtctccagaaaaagttattatcacaactccggcttcgcc

SEQ ID NO: 16253 - RNA, 141 nt, Paenibacillus sp.
  source 1..141: mol_type = other RNA; note = Related to NZ_FNAZ01000007.1
ttagaactttatgtggttttatgccacaggtttggcgagtcgtcaagctaagaagaacattatttacaagccttggtgatcataacttttccctccgacggagtctacagaaaaagttatgaccaccactccggctgatgc

SEQ ID NO: 16254 - RNA, 139 nt, Sporosarcina limicola
  source 1..139: mol_type = other RNA; note = Related to NZ_JADBEL010000024.1
ttagacttaaagtggtttaaccacgcgtttggcgagtcgccaagcgaagaagaaccttacttacaagcctggtgttaatagcttcgtctgttcgcctggaggctctcatccaaagctattaacacactacggctggcgc

SEQ ID NO: 16255 - RNA, 141 nt, Rummeliibacillus suwonensis
  source 1..141: mol_type = other RNA; note = Related to NZ_VCBL01000006.1
attagactttgtgtgatacttatatcacacgtttggcgagtcgccaagcgaagaagaacagtattttctagccttttgttaataacttctccatttcccggaggtcaattccaaagttattaacaacactccggctaacgc

SEQ ID NO: 16256 - RNA, 141 nt, Bacillus halotolerans
  source 1..141: mol_type = other RNA; note = Related to JAEACL010000003.1
ttagacttgttgtgatatttataatcacacgtttggcgagtcgccaagcgaagaagaacagtattttcaagccttttgttaataacttttcatctcccagaggtcgaattacaaagttattaacaacactacggctagcgc

SEQ ID NO: 16257 - RNA, 137 nt, Lysinibacillus xylanilyticus
  source 1..137: mol_type = other RNA; note = Related to NZ_LFXJ01000013.1
ttagacttatgtgaataacaatcacatgtttggcgtttcgccaagcaaagaagaactgtatttctagcctgtcattaatagcttttcaatttcccggaggtcaatttcaaagctattaatggcactccggctttgcc

SEQ ID NO: 16258 - RNA, 140 nt, Bacillus sp.
  source 1..140: mol_type = other RNA; note = Related to JAEKFM010000007.1
ctagacttatggtttttttttaaaaaaaccaggtatggtgagtcaccatactaagaagaacttaatttcaagccctgtgtaatacatttaacgcgtcgggagacgctatataaatgtattacacaaccttaggcttgcgc

SEQ ID NO: 16259 - RNA, 128 nt, Bacillus mycoides
  source 1..128: mol_type = other RNA; note = Related to NZ_CP071813.1
ttagaccttaacaatagttaattgtggctttggcgagtcgccaaggtaggaagaacttattttcaagcccattctaaaaggtgttcatccagcaggagctgttcagagccaccttttagacaccagac

SEQ ID NO: 16260 - RNA, 143 nt, Brevibacillus brevis
  source 1..143: mol_type = other RNA; note = Related to LR134338.1
gaaaaatattagacttacgttgagaacacgttgtctgacgagtcgtcaggcggagaaggacttaatttcaagccatctttacaagcactaagcttcaaaccggagcttttcgcttagtgcttgtaaagtccgctgcgcttcaa

SEQ ID NO: 16261 - RNA, 137 nt, unidentified
  source 1..137: mol_type = other RNA; note = Related to JAFQBM010000021.1; note = Lachnospiraceae bacterium
taattagcctcattcacgcaagtgatggttgatgagttcgtcaatcagagaagaacttacttttctagcctgtgtttaaactccttccttttcgcaggagcgaaaactcatgagtttaaacacctacacaaattttt

SEQ ID NO: 16262 - RNA, 134 nt, Eisenbergiella sp.
  source 1..134: mol_type = other RNA; note = Related to NZ_LT969517.1
ttagactcattcacattagtggtgattgatgagttcgtcaatcagagaagaaccagtttttcaagcctttgtgtgaacttagtctttttcacaggagtgaaaaagactaagttcacacagcttcgcaaatgaat

SEQ ID NO: 16263 - RNA, 129 nt, Spirosoma endophyticum
  source 1..129: mol_type = other RNA; note = Related to NZ_FOLQ01000021.1
ttagacttacgcgtgaaaacgcaggattgatgagtcatcaatctaagaagtaccttacatcgagccaaaacctaatcgtttatttggtagcagagctacctgcataaacgattaggttccgacgagaaa

SEQ ID NO: 16264 - RNA, 139 nt, Dorea longicatena
  source 1..139: mol_type = other RNA; note = Related to QRIC01000038.1
aatctttagacttagcacttatgtgcgggattagcgagtcgttaatctttgaggaacttacttttcgagccggagtaatacttgtccatgattttacaggagtaaaatcctgaacaagtattacgggtcgtgattttgt

SEQ ID NO: 16265 - RNA, 136 nt, Ruminococcus sp.
  source 1..136: mol_type = other RNA; note = Related to FMEZ01000001.1
tttagactttgcacgtatggtgcgggattagcgagtcgttaatctttgaagaacttacttttcgagccggagtaatacttgttcatgattttacaggagtaaaatccaaaacaagtattactggtcgtgattttgt

SEQ ID NO: 16266 - RNA, 140 nt, unidentified
  source 1..140: mol_type = other RNA; note = Related to JACRSZ010000030.1; note = Proposed Jingyaoa shaoxingensis
aaatctttagacttagcacatttgtgcgggattagcgagtcgttaatcttagaggaacttatttttcgagccatagtaagacttgttcgttcttttacaggagtaaaatcccaaacaagtcttacaggtcgtgattttgt

SEQ ID NO: 16267 - RNA, 138 nt, Solobacterium sp.
  source 1..138: mol_type = other RNA; note = Related to RKBT01000103.1
tttagactttgcattttatatgcgggaatagcgagtcgttattctttggagaatggtttttactagccattctagaaaagatttaatttctcacaggagttctaaatttaaatcttttctagctgcttgtaaattgaa

SEQ ID NO: 16268 - RNA, 138 nt, unidentified
  source 1..138: mol_type = other RNA; note = Related to JAFYBR010000063.1; note = Lachnospiraceae bacterium
tttagacgatacacttagaaacaggtgtaagggatccgcgagtcgcggatctaagaggaacttgtcctctggtcgcctgaatccgccgcgctttacaggagtaaagcgccactgcttcaggcattgcgcgctttcata

SEQ ID NO: 16269 - RNA, 135 nt, Blautia sp.
  source 1..135: mol_type = other RNA; note = Related to NZ_LT635539.1
ttagaactatgcacaatggtgcgggaatggcgagtcgtcattcttagaagaacttgcttttctagccatatgacagattactcgtcaatttatgggaataaattaccaagtaatctgtcacagtgcttcccaaac

SEQ ID NO: 16270 - RNA, 136 nt, Fusobacterium nucleatum
  source 1..136: mol_type = other RNA; note = Related to NZ_CP028101.1
atagattaattattaatttatagggattgatgagtcatcaatctagggagaacagattttcaagcctgtggataagaactattcatatttctctagaaagagcaatattcatagttcttatctgcaagaattgcgt

SEQ ID NO: 16271 - RNA, 127 nt, Clostridium sp.
  source 1..127: mol_type = other RNA; note = Related to WWTL01000016.1
ctagacttatgcacttggtgcggggttggcgagtcgtcaacttaagaagaacttattttcaagcctgtgtaagaacaagctggattttgcgggagcaaaatcaatcttgttcttacgtaatcgagaa

SEQ ID NO: 16272 - RNA, 133 nt, Blautia sp.
  source 1..133: mol_type = other RNA; note = Related to NZ_LT635469.1
ctagacttatgcactttgtgcgaggttggcgagtctgccaacttaagaagaacttattaacaagcctgtgtaagaacaagttcgattttgcgggagcaaaatctatcttgttcttacaaactcgagaattcat

SEQ ID NO: 16273 - RNA, 134 nt, Eubacterium sp.
  source 1..134: mol_type = other RNA; note = Related to QTVG01000007.1
ctagacttatgcactttgtgcagggttgtcgagtctgtcaacctaagaagaacttattttcaagcctgtgtaagagcaatctttattttgcaggagcaaaatcaagattgttcttacgtattcgagaattcgga

SEQ ID NO: 16274 - RNA, 135 nt, Geobacter sp.
  source 1..135: mol_type = other RNA; note = Related to VMKF01000001.1
tctagaccatgtgactctgtcacgtgaatggcgagtcgccattctaggaagaactgcttttctagccccgtatcgtcagacacttcgtcaattggatattgccgcagtgtctgacgatactacttcgcttcgctt

SEQ ID NO: 16275 - RNA, 123 nt, unidentified
  source 1..123: mol_type = other RNA; note = Related to QZJW01000035.1; note = candidate division WS5 bacterium
ctagccctatggtgagagatcaccgggatggcgagtcgtcatcctaggaagaactggctttcgagcctttgtgaacccggactcgtgcgccggaggcacccgagcccgggttcacaataacta

SEQ ID NO: 16276 - RNA, 131 nt, Maridesulfovibrio ferrireducens
  source 1..131: mol_type = other RNA; note = Related to JAEINN010000002.1
tcattagaactttgggattactcccaatagagtggcgagtcgccattcccgaacgaacatcctttcaagccttttatgatcgtagcagctgctccggaggagacagctactacaatcataacgctgcgggc

SEQ ID NO: 16277 - RNA, 129 nt, Desulfocapsa sulfexigens
  source 1..129: mol_type = other RNA; note = Related to NC_020304.1
ctagccttagtggcttagccacggaatggcgagtcgccattctggggagaacttgctttcaagcccaggcgaagattcaccaactcttggaaagagttggcgaatcttcgccccgcttccgcaaaagcc

SEQ ID NO: 16278 - RNA, 134 nt, Hymenobacter sp.
  source 1..134: mol_type = other RNA; note = Related to NZ_CP040896.1
ttagtatcaggtagcttttaaagctacagggttgatgagtctgtcaacctgatgagaacttacattcgagcaattaataatgaaataaagtcaaagggatttgtcttcatctcattattaattacggcatgaca

SEQ ID NO: 16279 - RNA, 105 nt, unidentified
  source 1..105: mol_type = other RNA; note = Related to SEFI01001149.1; note = Sphingobacteriaceae bacterium
gattagcgagtcgttaatctaagaagaaccgactttcaagcggcatcaccgacactcattaagcgtcggagatgcttaatgagtgtcggtgatgccgctccggct

SEQ ID NO: 16280 - RNA, 138 nt, unidentified
  source 1..138: mol_type = other RNA; note = Related to JAFVUY010000108.1; note = Bacilli bacterium
tacatcagaatgtatattattaaatataccgattggcgagtcgccaatcttttaggaactggctttcaagccctgcaacgagtttcttttctttactgggaagtaaagacccgaaactcgttacagctcgcagttgga

SEQ ID NO: 16281 - RNA, 133 nt, unidentified
  source 1..133: mol_type = other RNA; note = Related to SVPN01000006.1; note = Oscillospiraceae bacterium
acatcagaacgtattctatgaatacagattggcgagtcgtcaatcatttaagaactgcctttcaagccttgcgtctacttttatcttttggtggaaccaaaaggctaaaagtagacgcagcttcgcaacgtgt

SEQ ID NO: 16282 - RNA, 140 nt, Caproicibacterium amylolyticum
  source 1..140: mol_type = other RNA; note = Related to NZ_CP060696.1
tgcatcagactgtattcgcaagaataccgattggcgagtcgtcaatcttttatgaactgtctttcaagccccgcatagattttttcatacttcacttggaagtgaagccaaaaaatctatgcggctacgcagcaagctgc

SEQ ID NO: 16283 - RNA, 140 nt, Ruminococcus albus
  source 1..140: mol_type = other RNA; note = Related to NZ_FOAT01000022.1
gtaccagaattgtattcaatatgtgaatacggattggcgagtcgtcaatcatttaggaacatgctttcaagcctttcgacaaatgtcttcattttcctagaaggaaaatgaatcaatttgtcgaaagctgagcaaagctc

SEQ ID NO: 16284 - RNA, 132 nt, Faecalibacterium gallinarum
  source 1..132: mol_type = other RNA; note = Related to NZ_BQKV01000037.1
ctagaactatattctgtaagaatataatgaatggcgagtcgtcattctttgaagaaccccttttcgagccctcagggattcaaagcaaaagacggagcttttcctttgaatccctgatgcttcgcaagagtt

SEQ ID NO: 16285 - RNA, 134 nt, Faecalibacterium prausnitzii
  source 1..134: mol_type = other RNA; note = Related to WKQN01000003.1
ctagaactatattctgcacaagaatataatggatgacgagtcgtcaccctttggagaaccatttttctagccctcagggattcaaatcaaaagacggagctttttctttgaatccctgatgcttcgcaagagaa

SEQ ID NO: 16286 - RNA, 93 nt, Pedobacter sp.
  source 1..93: mol_type = other RNA; note = Related to NZ_QGNY01000001.1
ttagctcaagtggcccgtgagggctacgggtaagcgattcgtttacctgaggggaactttctttctagcgatttatacgatgagaaaatagac

SEQ ID NO: 16287 - RNA, 116 nt, Mucilaginibacter sp.
  source 1..116: mol_type = other RNA; note = Related to NRSW01000001.1
ttagctcaagcagcttcggttgcggattagcgagtcgttaatctgaggagaacattgtttcgagcgtttgatattgttgagtttcgcggagctcttaggtgtatagcgcctcgagc

SEQ ID NO: 16288 - RNA, 130 nt, Paeniclostridium sordellii
  source 1..130: mol_type = other RNA; note = Related to CDNR01000033.1
ctagaaacaaatggttttgtaccattagcagtacgagtcgtactgcctttgagaactgaatttcaagctacttcacagaaggcactccttcgggactcagtagcgccttctgtgaatgccccaaaggggc

SEQ ID NO: 16289 - RNA, 135 nt, unidentified
  source 1..135: mol_type = other RNA; note = Related to SEFT01000010.1; note = Sphingobacteriales bacterium
ttagactcggtagctgcttagcagttacagataggtgattcacctatcggagaagaaccagctttcaagctactttaataaatatctgcgttcgcaggagctctcttgagtatttattgaaagctatatataagt

SEQ ID NO: 16290 - RNA, 130 nt, Butyricicoccus sp.
  source 1..130: mol_type = other RNA; note = Related to QUJF01000028.1
tgttagcgtatcgtttataacgatagtaatgcgagttcgtgttacgagtaaattctagttttcaagccccagataaacagttattttgtcgaggacgtcaaaataactgtttatctgaaccacttttgac

SEQ ID NO: 16291 - RNA, 142 nt, unidentified
  source 1..142: mol_type = other RNA; note = Related to JAFVWM010000017.1; note = Alphaproteobacteria bacterium
attagtcttagcaacttttgttgcgctgtaacgagtcgttatggtagaatgaactttcttttcgagccttagatacgctcaactttgtttaaacacagaggtttaaccgaaagttaagcgtatctaactcgcaagctcgtgt

SEQ ID NO: 16292 - RNA, 138 nt, unidentified
  source 1..138: mol_type = other RNA; note = Related to JAFXYS010000380.1; note = Candidatus Saccharibacteria bacterium
gaagaactagcctagacagaaatgtcggaacagcgagtcgttgttcttgattggaatagggttttaaccctcacttcaatgtgcgctcgaatcatcgatgatgcttctcgtttacattgaagtcattaaggctctcac

SEQ ID NO: 16293 - RNA, 138 nt, unidentified
  source 1..138: mol_type = other RNA; note = Related to JAGBFB010000015.1; note = Spirochaetaceae bacterium
agagaactagccatttgcagtaatgcatagaattacgagtcgtaattcgagacgagaacacccttttagcgtaggtcaaaagccttcgtatgatttggaaaatcatctcagtcttttgacctacgtatagaaatctga

SEQ ID NO: 16294 - RNA, 133 nt, Prevotella copri
  source 1..133: mol_type = other RNA; note = Related to NZ_VTYX01000020.1
ttagtttaatgcgagaaatgcatggaattgtgagtcacaattcttctgagtaattacatcaagattgccattacaataaattttgtatggcaggagccatacaaaatttattgtaatggctggagccaaaggc

SEQ ID NO: 16295 - RNA, 141 nt, Prevotella sp.
  source 1..141: mol_type = other RNA; note = Related to JAGZTO010000032.1
ataaagatattagttaagtgcattgaagcatggaaaagtgagtcacttttctttagaatagttataatcaagcctgccactccataaaatttggagtgcaggagcacttcaaattttatggagtggccgaacccttcgggt

SEQ ID NO: 16296 - RNA, 133 nt, unidentified
  source 1..133: mol_type = other RNA; note = Related to SUXO01000014.1; note = Bacteroidales bacterium
ttagtttgtccacttcggtgtgaggattagcgattcgttaatctactgagaatcttctttcaagccaaagtaatgtttagtttttacttcttggaagaagtaaaaactaaacattacttcggtcgcaagacaa

SEQ ID NO: 16297 - RNA, 138 nt, unidentified
  source 1..138: mol_type = other RNA; note = Related to MKRS01000610.1; note = Bacteroidales bacterium 45-6
tttttagtttgtcacatgaaaatgtgaagattgacgagtcgtcaatcgactgagaatttcctttcaagcctggaagtaagatgcaaattttgctttctggagaaagcgaaatttgcatcttacttcgactgcgcaagc

SEQ ID NO: 16298 - RNA, 140 nt, Pontibacter silvestris
  source 1..140: mol_type = other RNA; note = Related to NZ_JAJJWI010000010.1
acattagactcagatggcttcggccatcatgaaaggcgagtcgcctttctgagaggaaccggttttcaagccgtttagtaaataaatgtttgttttgcggagcagaaacaaatcatttatttacacgcgctgcggggttt

SEQ ID NO: 16299 - RNA, 132 nt, Rhizobium leguminosarum
  source 1..132: mol_type = other RNA; note = Related to JACIGQ010000001.1
ttagaacccagcggtaagaccgcaggatcggcgagtcggcgatctggattggatggtactttaggcccattcaatggaaatgaatttttcacggaggaaaaatgtaatttccattgaagcgccttacggcgc

SEQ ID NO: 16300 - RNA, 135 nt, Rhizobium sp.
  source 1..135: mol_type = other RNA; note = Related to JACYUZ010000001.1
ttagaaccaagcggtaaaaccgcaggattggcgagtcgtcaatctggagtggatggaactttaggcccattcaatggaaatgaatttttcacggagcgaaaaataagtaatttccattgaagcgcctaacggcgc

SEQ ID NO: 16301 - RNA, 133 nt, Rhizobium sp.
  source 1..133: mol_type = other RNA; note = Related to NZ_LJIB01000039.1
ttagaccccagcggtaatgccgcaggattggcgagtcgccaatctggattggatggcacttcaggcccattcaatggaaatgaatttttcacggagcgaaaaatgtaatttccattgaagcgcctaaaggcgc

SEQ ID NO: 16302 - RNA, 133 nt, Brucella anthropi
  source 1..133: mol_type = other RNA; note = Related to NZ_LSVB01000004.1
ttagaccctagcggccagaccgcaggatgagcgagtcgcgcatctggaacggaccttactttaggcccacccaacgaaaacgaatttttcacatagtgaaaaatatagttttcgttgtagcgcccaaagggcg

SEQ ID NO: 16303 - RNA, 132 nt, Agrobacterium sp.
  source 1..132: mol_type = other RNA; note = Related to JAAXMM010000032.1
ttagaccctagcggcttgaccgcaggatgagcgagtcgctcatctggattggaccgtatttcaggcccactctatgaaaacgaattttccacggagtggaaaatgtcgttttcatagtcccgcccttcgggc

SEQ ID NO: 16304 - RNA, 132 nt, Aureimonas leprariae
  source 1..132: mol_type = other RNA; note = Related to NZ_VZDO01000003.1
ttagaccctagcgactgacgtcgcaggatgagcgagtcgttcatctggcgtgaacatgactttaggcccttgattggaacgagttctccacggagtgtcaaacgtcattccaatcaaagcgcctaaaggcgc

SEQ ID NO: 16305 - RNA, 120 nt, Tritonibacter mobilis
  source 1..120: mol_type = other RNA; note = Related to CP015231.1
tgagtagttttgatactgcaagccgggatggcgagtcgccatccattgaccggacgtacaacaagccattaccgtcacaattttctcgcggagctgcgaaaactgtgacggtaattcgga

SEQ ID NO: 16306 - RNA, 119 nt, Leisingera caerulea
  source 1..119: mol_type = other RNA; note = Related to NZ_KI421513.1
tgagtagtttaacactgcaagccgggatggcgagtcgccatccattgaccggacgtacaacaagccattaccgtcacaattttctcgcggagctgcgaaaactgtgacggtaattcgga

SEQ ID NO: 16307 - RNA, 119 nt, Roseomonas sp.
  source 1..119: mol_type = other RNA; note = Related to JADCGC010000017.1
gaaagattacgagctggggcggcgagtcgccgtccatggtcggactgagaacaagccactacctttgccagcctctcgcggagctgcgaggccgtcaaaggtgttgctgcgtccttcgt

SEQ ID NO: 16308 - RNA, 134 nt, Thalassobius mangrovi
  source 1..134: mol_type = other RNA; note = Related to NZ_WWEN01000004.1
ttagtactgacggttgacgctagtcgactgtcggagtcgcgagtcgcgtctcttagatcggacctagtacgagccatcgccttcgcgatgcttcgcaggagcaaagaaccgcgaaggcgatgtcgtccttacgt

SEQ ID NO: 16309 - RNA, 133 nt, Shimia sp.
  source 1..133: mol_type = other RNA; note = Related to JAEPMN010000068.1
ttagtgctgacggttgacctcggtcaatcgtcggggatgcgagtcgcttccctttgatcggacctagtacaagccatcgtcttcgcgatactttgcggagcaaagaagcgcgaagacgaactcgtccttacgt

SEQ ID NO: 16310 - RNA, 125 nt, Mesorhizobium sp.
  source 1..125: mol_type = other RNA; note = Related to RZOF01000138.1
tgagtcaaaagctcatgcgtcggtgcgtcgagtcgacgtgcaagattgaacgtaacatcaagccgttggcacaccttcggctcacaggagctcacctctcggtgtgccaatgctccttcgtcgca

SEQ ID NO: 16311 - RNA, 137 nt, Stenotrophomonas maltophilia
  source 1..137: mol_type = other RNA; note = Related to NZ_CP090423.1
ggcgagttagcacatgccgcaaggcaggatcggcgagtcgccgtatctggaaagaactgtcattcaagcctcaggccgaatccgtcgtcgcgagcaggagctcgcaacgccgccttcgacctgcgccatgaagccgg

SEQ ID NO: 16312 - RNA, 137 nt, Xanthomonas arboricola
  source 1..137: mol_type = other RNA; note = Related to NZ_KL638873.1
ggggaattagcacatgccgaaaggcaagatcggcgagtcgccgcatctgggaagaactgtcaatcaagccttaggccgaatccgccgtcgcgagcaggagctcgcaacgtcgccttcgacctgcgccatgaaaccgg

SEQ ID NO: 16313 - RNA, 133 nt, Stenotrophomonas maltophilia
  source 1..133: mol_type = other RNA; note = Related to NZ_JVIE01000007.1
ttcaagttagcacatgccgaaaggcaaggccggcgagtcgccgagcctgaagcgaactatcattcaagcctcaggccaaaagcgtcattgcgagcaggagctcgcaacgccgttttggcctgcgccatgaaac

SEQ ID NO: 16314 - RNA, 129 nt, Methylobacterium sp.
  source 1..129: mol_type = other RNA; note = Related to NZ_CP029551.1
ggaagaccacgtgggcaaccacaggagcggcgagtcgccgttctggagtgaactggctttctagcagggtgccagactgattttgaccggaggtcaaaagtcagccaggcaccgctcggctaaagcctc

SEQ ID NO: 16315 - RNA, 133 nt, Methylorubrum populi
  source 1..133: mol_type = other RNA; note = Related to NZ_CP039546.1
ggaagcccatgtgggtaaccacgtgaatggcgagtcgccattctggagtgaacatcctttcgagctgctgatgaaaaccaaatttcggctagaagccaaaatccggttctcatcagacgctcggcaaagccga

SEQ ID NO: 16316 - RNA, 133 nt, unidentified
  source 1..133: mol_type = other RNA; note = Related to JAGQPV010000303.1; note = Planctomycetaceae bacterium
gtagtcccatcggcttggccgaggggcgtcgagtcgacgccctggggaactctcccctttcaagcccagcacattgaccaagcacctgaccgggaggtcaggttggttggtcaatgtgctcgctcagcttcgc

SEQ ID NO: 16317 - RNA, 132 nt, Rhodovibrio salinarum
  source 1..132: mol_type = other RNA; note = Related to NRRE01000008.1
ctagtcctatgtggtttgaccacacgagtggcgagtcgccactcgaggaagaacgctccttcgagccagcgagcgggcggggttccccaaaaggatttggcgaaccccgcccgctcgtgcgtcggcaaagca

SEQ ID NO: 16318 - RNA, 132 nt, Chthonobacter albigriseus
  source 1..132: mol_type = other RNA; note = Related to NZ_JACDIT010000005.1
tacgacgctagcggctctgccgcacgggaagcgagtcgcttcccaagggtgaactgacgaaacgacctagtcatggaccaatttctgcgcaggagctcgaaatcagtccatgactagcgctttcagcgctgc

SEQ ID NO: 16319 - RNA, 135 nt, Methylosinus sp.
  source 1..135: mol_type = other RNA; note = Related to NZ_AP022332.1
gtgctagcagctagcgactcgatcgctaggaatggcgagtcgccattcttgagagaaccggctttcaagccctggtccggcgccctcgaactgcgggagcacttcgacggcgccggaccatgctcccgttggtcg

SEQ ID NO: 16320 - RNA, 130 nt, Thalassospira xiamenensis
  source 1..130: mol_type = other RNA; note = Related to JALLPZ010000001.1
ctagtactagtggccatagccacacgagcggtgagtcaccgttcttgaaagaactggctttcaagcctcgatctaagggagctttcaattgccggaggcaattgagaagctcccttagatagctccggaa

SEQ ID NO: 16321 - RNA, 123 nt, Bacteroides uniformis
  source 1..123: mol_type = other RNA; note = Related to CZAO01000003.1
attagctaagtctgaggtccacaagttaccaaagatattacagccccttggctgtgagtgcaaaattaagaatcattttactaataattatgacagacaagtctgtcataattatcagcctat

SEQ ID NO: 16322 - RNA, 124 nt, unidentified
  source 1..124: mol_type = other RNA; note = Related to JAAVFK010000042.1; note = Bacteroidales bacterium
tatagcagtatctgtgaaaacagaggcctgtacccgtttggtgcagtctatattaagctactttacatgatttctgtgtcacacccttcgttgcactacaggcgcgacacagaattcgccgata

SEQ ID NO: 16323 - RNA, 125 nt, Alistipes sp.
  source 1..125: mol_type = other RNA; note = Related to JAFQIH010000031.1
attagcactgtctgcgaaagcagaagcctgcgcccgtttggcgcagacgagttaaagcaactttacatgattattatgtcataccccttcgctacgctcgaagcatgacataatagtcgccgatt

SEQ ID NO: 16324 - RNA, 114 nt, unidentified
  source 1..114: mol_type = other RNA; note = Related to SUYB01000005.1; note = Bacteroidaceae bacterium
attagcagtatctgtacagacagaagcctgcgtccgtttgatgcaggaaagttaaagtcacattacatgatttctatgtcacaccccatgggcgcgacatagaagtcgccgaaa

SEQ ID NO: 16325 - RNA, 107 nt, Flavobacterium psychrophilum
  source 1..107: mol_type = other RNA; note = Related to BJSX01000096.1
attagctatgtcatttattgactttttaatcccttttggattaagaataattaaagctaaattatactgattagtgtgcaacaaaagtcgcacactattcactccgt

SEQ ID NO: 16326 - RNA, 120 nt, unidentified
  source 1..120: mol_type = other RNA; note = Related to JAGPFU010000113.1; note = Paludibacteraceae bacterium
attagctttgtcaattaattttgacctctttgtcccgttcggattaagggttatttaagctacattatactgatttgtgcgtaccacctcgtgcctcgggtcacgcacaattcacttcgt

SEQ ID NO: 16327 - RNA, 120 nt, Flavobacterium anhuiense
  source 1..120: mol_type = other RNA; note = Related to NZ_CP016907.1
attagctttgtcaataaaaattgacttctttgtcccgtttggattaaggactattaaagctacattatactgatttgtgcataacacctcgttcctcgggccacgcacaattcacttcgt

SEQ ID NO: 16328 - RNA, 131 nt, Flavobacterium lindanitolerans
  source 1..131: mol_type = other RNA; note = Related to JAEUTX010000024.1
attagcttagtctttatttttttacataaagacttcttaagactgtttgtctataagaataaatcaagctacattatactgattcatgtgcaacgcctgcgggcactcgggttgcacatgattcacttcgt

SEQ ID NO: 16329 - RNA, 128 nt, Alistipes indistinctus
  source 1..128: mol_type = other RNA; note = Related to AP023049.1
attagctgtgtcttctagaagacatcttgagctcgtttggctcaagagtaattaaagctacattatactgattaatgtgtaatacctgcgttcgcaagctcacttgtatcacacattattcactcaga

SEQ ID NO: 16330 - RNA, 128 nt, Chitinophaga filiformis
  source 1..128: mol_type = other RNA; note = Related to NZ_FNBN01000017.1
tttagcctttctctcgcaagagaaatcaaagccttgttttgatatgtctaaagctactttatactaaataatgtacaacaatcgccttcttgcgtcgcggggcgttgctgtacatcattcactaacgt

SEQ ID NO: 16331 - RNA, 128 nt, Chryseobacterium viscerum
  source 1..128: mol_type = other RNA; note = Related to PPEG02000004.1
tttagttgtttctctgtggtaagagaagatttgcttcttgagcaaagtaataaataaagctactttatattatcttgatgaaaaacctttccacttctttcctttcctgtttttcatcaacacaacat

SEQ ID NO: 16332 - RNA, 126 nt, Cellulophaga sp.
  source 1..126: mol_type = other RNA; note = Related to JAAALB010000001.1
attagctgttctcctagtgagataacttgttctttgaacaaggcaattctaaagctactttacattaactggtgtgtaacatatccaacgcacgggcaaccctgctgttacacaccaatcactaat

SEQ ID NO: 16333 - RNA, 143 nt, Arenibacter sp.
  source 1..143: mol_type = other RNA; note = Related to JALKBC010000033.1
gcaagcaatttcaggtttaggttcttttctaaaggagattagacttgaatgggcaggcagtagtctgttcagggttgaagttacttttcaacacatccagtacaacatatcccttcgggagagttgtgctggatatgctacgc

SEQ ID NO: 16334 - RNA, 145 nt, Muricauda sp.
  source 1..145: mol_type = other RNA; note = Related to NZ_LXTT01000008.1
gcaagcaatttcaggcataactacatttttttaaatgagatagggcctggaggctcgggcagtagtccgtgcagggttgaagttacttttcaacacttccagtacaacatatcccttcgggagagttgtgctggaaatgctccgc

SEQ ID NO: 16335 - RNA, 146 nt, Bizionia paragorgiae
  source 1..146: mol_type = other RNA; note = Related to NZ_FNQK01000016.1
gcaagctatttcgagtcagtttgtgttcgtgagaacatttgaaggacaagaactcatagacagtagtttatgtaggactgaagcatcttttcaacttttactacacaaaaccttcctacgtcaggttcgtgtagtaaatgcttcgc

SEQ ID NO: 16336 - RNA, 134 nt, Cyclobacterium roseum
  source 1..134: mol_type = other RNA; note = Related to NZ_WNKF01000001.1
gcaagccgtttcgagtcaatttgtatttaaaggacgagaatgcttgggtagtaatccgagtaggactgaagcatcttttcaacattttcagcacaacgcctcactgcgttcgggtcgtgctgaagatgcttcgc

SEQ ID NO: 16337 - RNA, 146 nt, unidentified
  source 1..146: mol_type = other RNA; note = Related to MENU01000192.1; note = Bacteroidetes bacterium GWE2_29_8
gcaagcaatttcgagtcaatttgtgtttgaaaaaacatttaaagggcaagaatacctgggtagttatccaagtatggctgaagcaacttttcaacatttactacacaagatcctccttcgtcagactcgtgtagtatatgcttcgc

SEQ ID NO: 16338 - RNA, 138 nt, Flavobacterium fluviale
  source 1..138: mol_type = other RNA; note = Related to NZ_CP030261.1
gcaagcaatttcaagtcatttaaataagtttaaatcttgatttcctggatagttatccaagaatttagtgaagtaacttttcaaactttactgcacaatatcctcactacgttccggtttgtgcagtaatgctcacgc

SEQ ID NO: 16339 - RNA, 149 nt, Flavobacterium soyangense
  source 1..149: mol_type = other RNA; note = Related to NZ_JADHEC010000003.1
gcaagcaatttcaagtcaatgtagttttttaactacatttaaagggcaagaatacccgggtagttatccaagtagggctgaagcatcttttcatcatttcccacacaacatcctcctaaaaagtcggacctgtgtgggatatgcttcgc

SEQ ID NO: 16340 - RNA, 142 nt, Polaribacter sp.
  source 1..142: mol_type = other RNA; note = Related to NZ_CP074436.1
gcaagcaatatcttgtcttaatacaaattgtaataagaaaggtgacttgaacagttgttcacgtttagctgaagttacttatcaactttcataccacaacatctctgcaagtattcaagagttgtggcataatacgcttcgc

SEQ ID NO: 16341 - RNA, 142 nt, Chryseobacterium sp.
  source 1..142: mol_type = other RNA; note = Related to NZ_LR824569.1
gcaagcaatttcttgtttaaacgctacggaatataagcaggattacctgaacagttgttcaagtttagctgaagatacttatcaactttctcaccacaacatcattccaagtattcatgagttatggtgggatacgcttcgc

SEQ ID NO: 16342 - RNA, 142 nt, Muricauda sp.
  source 1..142: mol_type = other RNA; note = Related to PASE01000008.1
gcaagcagtatcttgtttaatatcaagtattagtaaacaggatcccttgagcagttgttcaagcttagctgaagcatcttatcaactttcactacacaacatctctgcagggattcaagacttgtgtagtaaatgctggcgc

SEQ ID NO: 16343 - RNA, 179 nt, Chitinophaga niabensis
  source 1..179: mol_type = other RNA; note = Related to NZ_FSRA01000001.1
acaagcattatcttgtttaattgtgtcgaaagacattaaatatttcgcagaaatgcataaatatttgtacaaaggcaagataacatgagcagttgcacatgtatggctgaagtaacttttcaacctttaatgcacaacatgtctccaagtattcaaaagttgtgcattaaacgcttcgc

SEQ ID NO: 16344 - RNA, 185 nt, Mucilaginibacter sp.
  source 1..185: mol_type = other RNA; note = Related to JACCBZ010000002.1
gcaagctatatcttgtttaattacgcaaatagcgtttattttcgagttggccagcaatgtccaatcttgatgttacgaaagcaagataacctgaacagttgttcaagtgtggctgaagcaacttttcaacttttaacacacaacatgtctgcaagtgttcgccacttgtgtgttaaatgcttcgc

SEQ ID NO: 16345 - RNA, 167 nt, Arcticibacter tournemirensis
  source 1..167: mol_type = other RNA; note = Related to VFPL01000001.1
gcaagcaacatccggcctaacttggcacttactgcctttgttttctgaaaggaaaatgcaaaggtcggatatcccatcagtagatggggaaatggttgaagatacttttcaacccttgatacacaacatcactgcaggtattcgcgagttgtgtaccaaagcttcgc

SEQ ID NO: 16346 - RNA, 121 nt, Bacillus sp.
  source 1..121: mol_type = other RNA; note = Related to CP095875.1
actagattcactacattgggagtgtagagactaaggcatttgtcttagtggcataaagcaactttataacaagcctgcaccaccacttgcttcactgcgggttgcacaggctgtttcaagc

SEQ ID NO: 16347 - RNA, 132 nt, Brevibacillus sp.
  source 1..132: mol_type = other RNA; note = Related to VFNO01000006.1
gttagccgtggcctttgttatggcgactaagttgagtcaacttagtaattgtaaagcaactttcattgcgtcttctctacaaccattgacagaaagtatctcgaagaagtaggttgcagagaaggcgcacac

SEQ ID NO: 16348 - RNA, 140 nt, Paenibacillus sp.
  source 1..140: mol_type = other RNA; note = Related to NQMO01000005.1
gctagcatcggcctaataaaccaggcgactaggttgagtatacctagtaaggataatgtttctattatagcaacttctctacaaccacgagatacaggaagtaattcggagaagatggttgcagagaaggtgcacaccgc

SEQ ID NO: 16349 - RNA, 143 nt, Bacillus subtilis
  source 1..143: mol_type = other RNA; note = Related to CP026036.1
gttagcaatgccacaattaacgggtaccgccgcagttgtgggaccaagactggttaggcttggttgtgatgaagtgacttttaaacgactaattgcataacactacccaaaggcggggtaggctatgcaatccctcgctctgc

SEQ ID NO: 16350 - RNA, 140 nt, Bacillus sp.
  source 1..140: mol_type = other RNA; note = Related to CP043830.1
gttagagtttttcacgatcaaacggttttatctgttagagagtgaggccaagactatttggcttggctactgataaagttactttataacgacctggtacataacactccccttggtcggttatgcactatctcgctcgc

SEQ ID NO: 16351 - RNA, 109 nt, Maribacter algarum
  source 1..109: mol_type = other RNA; note = Related to NZ_VATY01000001.1
gttagcaattaaccctaataaggttttctcagtgtagttcattgagaattattgaagccacttgatagcataacttatatgttattaataatatgcttaaagactaaac

SEQ ID NO: 16352 - RNA, 109 nt, Polaribacter sp.
  source 1..109: mol_type = other RNA; note = Related to NZ_CP058986.1
gttagcaaataaccctagtacggttttctcagtgtagttcattgagaattagtaaagctacttgataatataatctatatgttatcaataatatgattaaagactaaac

SEQ ID NO: 16353 - RNA, 94 nt, Flavobacterium hydatis
  source 1..94: mol_type = other RNA; note = Related to NZ_MUGY01000012.1
gttagcaaataacccgtaataaggttttctcggtgtagttcatcgagaactaataaagctacttaatagcagactcagcaatacttttgctcac

SEQ ID NO: 16354 - RNA, 86 nt, unidentified
  source 1..86: mol_type = other RNA; note = Related to DTTW01000005.1; note = Flavobacteriaceae bacterium
gttagctaaatctctcataagagggattctcaggatagtttcttgagaagtactaaagctacttaacagaaatttatttgctatgt

SEQ ID NO: 16355 - RNA, 128 nt, Bizionia arctica
  source 1..128: mol_type = other RNA; note = Related to BMFQ01000008.1
tttagctttaatttttactagtagtaatagtagtaaaaagctaggactagttgtctatagttgtattaatgttagcttatatcgtttaagtagtgaaacgctaaaggttccactactcaaagcaaagc

SEQ ID NO: 16356 - RNA, 121 nt, Tenacibaculum sp.
  source 1..121: mol_type = other RNA; note = Related to SJXJ01000003.1
tttagctgtatttttactagaaatggtaaaaagctaggactagttgtctatagttgtattaatgttagcttatatcgtttaaatagtgcaacgctaaaggttacactattcaaagcagagc

SEQ ID NO: 16357 - RNA, 119 nt, Flavobacterium sp.
  source 1..119: mol_type = other RNA; note = Related to MUFX01000009.1
tttagctatttttttactttatgtaaaagctgtagactagttgtctatagatgtttttaatgttagcttatatcgtttaaatagtgaaacactaaaggttccactactcaaagcagagc

SEQ ID NO: 16358 - RNA, 132 nt, Parabacteroides sp.
  source 1..132: mol_type = other RNA; note = Related to QSQY01000003.1
tttagcttatacttttacttcttgtaaaaggctggaactagttgtctccggcagtaataatgttagtttacatcgtttaagtagtgaaactcggtctcgcaagctcgcaggcttcactactcaaagcatagc

SEQ ID NO: 16359 - RNA, 120 nt, unidentified
  source 1..120: mol_type = other RNA; note = Related to JAEUTP010000018.1; note = Bacteroidia bacterium
attagcaattgtttcaattttattgagacaccatgcacagtgggcatggttgctgtaaagctactctacatcattttgatgtacaacacccttcggggctgtacatcagaacgcgcgcgt

SEQ ID NO: 16360 - RNA, 125 nt, Mangrovimonas sp.
  source 1..125: mol_type = other RNA; note = Related to NZ_LBIQ01000028.1
attagccattatcaattttttgaaattgattctgttctgtatacgaatggaggctctaaagtaactttacatcatcttgtatgcaagtcggtacagttgtcagcttgcatacaacaacgcgcagc

SEQ ID NO: 16361 - RNA, 118 nt, Prevotella sp.
  source 1..118: mol_type = other RNA; note = Related to SUYI01000044.1
tctagctttgagtgaagatgaaatattctttgccggtatgtctcgtggacatactgaaattaaaacaccattatactgataatgctgaacaaggattgtccagcattgtcactaacgt

SEQ ID NO: 16362 - RNA, 118 nt, unidentified
  source 1..118: mol_type = other RNA; note = Related to JAGCCF010000043.1; note = Paludibacteraceae bacterium
tctagctttatgtgaagatgaaacattctttgccggtatgtctcgtgggcatactgaaattaaaacaccattatactgataatgctgaacaaggattgtccagcattgtcactgacgt

SEQ ID NO: 16363 - RNA, 117 nt, Coprobacter fastidiosus
  source 1..117: mol_type = other RNA; note = Related to NZ_RBXN01000012.1
tttagctttaagtaaagatgtaatactctttgcctgtatgtcccgggggcgtacagaaattaaaacacaattacactgatagtgctgaacaaggcttgtccagcactgtcactaaag

SEQ ID NO: 16364 - RNA, 123 nt, unidentified
  source 1..123: mol_type = other RNA; note = Related to MKTD01000020.1; note = Bacteroidia bacterium 43-41
attagctatcagtatagaaatatacgggttggtcttttggacttacttttattaaaacaactttatactgaataactgaaacgcgcctccgcaggctacagcggttccagttgttcacttcgt

SEQ ID NO: 16365 - RNA, 111 nt, Prevotella copri
  source 1..111: mol_type = other RNA; note = Related to VZAS01000054.1
attagctgaatatgggattagcatattcgtatgtcttttggacatgctagattttaaatgtcattatactaagtatatcgaacaataaatgttcgatatgctcacttgcgt

SEQ ID NO: 16366 - RNA, 139 nt, unidentified
  source 1..139: mol_type = other RNA; note = Related to JAGBLT010001022.1; note = Bacteroidaceae bacterium
attagcttatggttatccgttgtttcataacaaagatgacaggtcggttcccttggagcccactgaacagtaaaacacctttatactgtaacgatgaaatacgcttcgctttgctcgcgattccatcgctacactctgc

SEQ ID NO: 16367 - RNA, 170 nt, Bacillus sp.
  source 1..170: mol_type = other RNA; note = Related to NPDG01000102.1
aatagtctctagaaaggtagagagtctctatcagatttaatgttacttaattgattggatgaaaagaagaaaaccacttcttttcacccatgcaaattatcatttgcatgagcctaatgattaaataaaaagcaatttaatcataggcttaattttcataagtgattatt

SEQ ID NO: 16368 - RNA, 201 nt, Clostridioides difficile
  source 1..201: mol_type = other RNA; note = Related to JALMMK010000003.1
aataatctctagcaactaatagcgagtcgctatttaatatagaatgtttcttgatagatacagtactaaagcaagcgagttgtttagtactgtgttgaattaaataaaaagcgatttaattcaacacatttagtgaaccaaataaaaaacgatttaattcactaaatgtattttcaaaatacatgatttagctagtatatt

SEQ ID NO: 16369 - RNA, 152 nt, Romboutsia sp.
  source 1..152: mol_type = other RNA; note = Related to NZ_NOJY02000076.1
aataatctctagcaattaatagcgagtcgctatttaagatgaaatgtttctttatagatacaggactaatataagatcgttattagtcctgcgttgaattaaataaaaagcaatttaattcaacagttttatcggattaaataaaaaccaat

SEQ ID NO: 16370 - RNA, 216 nt, Clostridium formicaceticum
  source 1..216: mol_type = other RNA; note = Related to NZ_CP017603.1
aaagccctctagaatttgaacagcgaatcgctgttcgttatttaaagtttctaaatatctcatggaactaaaatcttcttgagagtaaggtttcgagggtcgaattttagttccatgtatattgcggaaaatcatcgcaatatacagcctaaaaaggtttaaactgcaaaacctttttaggctgagtttgcaattatagttttcgtagagggcttt

SEQ ID NO: 16371 - RNA, 185 nt, unidentified
  source 1..185: mol_type = other RNA; note = Related to JABXYS010000002.1; note = Peptostreptococcaceae bacterium oral taxon 081
tgcatggaatagaaatcgaatgacaagttgtcattcttaataaaaatgtatctttgtatcataggatgattatttaaagaaataatcatcctatgaaaccattggaattacaatggtttcgtctatctttattgcaagcaataaagatagagtatgtttcaataacagaattagtatttcatgca

SEQ ID NO: 16372 - RNA, 173 nt, Clostridium algidicarnis
  source 1..173: mol_type = other RNA; note = Related to NZ_JAHLDH010000001.1
atgtattaatagaaagcgaagaacaagttgttcttcatagttacaatatttctttgttttatagtagattaaagtcaaagactttaatctactgtaaacagttgcaactgcaactgtttacatcaacaccaaggtgttgatatattttaataacagaataggtattggtacat

SEQ ID NO: 16373 - RNA, 174 nt, unidentified
  source 1..174: mol_type = other RNA; note = Related to JAFUNX010000099.1; note = Clostridia bacterium
tatagtcattagaatatgaggagcaagttgcttctcgaaaacaaaacgtttcttctttgtcacatgtgaattcgaagaattcacatgcgcaaaagacggaatagcctatttgcacatgtgatgcttattctaagcatcacatgcaagaatgaatcagacagagtagtgactata

SEQ ID NO: 16374 - RNA, 182 nt, unidentified
  source 1..182: mol_type = other RNA; note = Related to CP042469.1; note = Clostridiales bacterium
tgtatcgattagaaagcgagaaacaagttgtttctcatagttaaaatgtcacttactgaatgaggataaaatcaaagattttatcctcgtccacaaaattaaaatcttgtggacgagcatatctgttggaaaatctcaacagatatgctcactagtacaaataaagaaacggtagtcgtgca

SEQ ID NO: 16375 - RNA, 183 nt, Acutalibacter muris
  source 1..183: mol_type = other RNA; note = Related to NZ_CP065321.1
tgtgtctgttagaatgcgagaagcgagtcgcttctctaagtgccaacggtgcttactttatcaatgtgtatgttcccagtaacatacacattgcaaagcgcttggaataaagcgctttgcaatggtattgcggtatgccgcaataccactgcttgttcagaaacagaatgggtaataggtacg

SEQ ID NO: 16376 - RNA, 202 nt, Dialister sp.
  source 1..202: mol_type = other RNA; note = Related to JABMAY010000023.1
tgtacgcattagaatgcggaacgcgagtcgtgttccaaagtagcaatggttcttatttcatcatgacaacaattcgcccggaattgttgtcatggcaaattgcttggaataaagcaatttgtcatgtcatacacgacaatttggagcggtccaaattgtcgtgatgccatgatttccaaattcagtacaggtaatgcgtaca

SEQ ID NO: 16377 - RNA, 174 nt, Erysipelothrix sp.
  source 1..174: mol_type = other RNA; note = Related to JAHRFW010000235.1
cacacctattagaaggcgaaagatcagtggtctttcatagctagaatgtcacttattacgattgtcaattatcgaagattaattgacaatagcattctgattaacagaatgcagtaatgtttggaaatactcaaacattacttgattataaaaatagatttggtagtaggtgtg

SEQ ID NO: 16378 - RNA, 206 nt, unidentified
  source 1..206: mol_type = other RNA; note = Related to PGZS01000061.1; note = Firmicutes bacterium HGW-Firmicutes-3
cgcatccgttagatggcgaaaggacagtggactttcataggatgtaggtttcttaatgtgcagataaagaaagccaagctttctttatctgtatatgttggcataacaacatatacagaatatattggttctcctcgcggaagcggttccgctcgtcaaaccaatatatactgcttaagcaaataaagattttggtagcggatgcg

SEQ ID NO: 16379 - RNA, 189 nt, unidentified
  source 1..189: mol_type = other RNA; note = Related to JAJFDX010000002.1; note = Proposed Lachnoclostridium pacaense
tgcatctgttagaaagcgaaaggacagtggcctttcatagttgcaaggtttcttaatatgcagattaagtagcaaagcatacttaatctgaatatgttggcattacaacgatattcagcaaatgttgttgcatgcgaatgcaacaacatttactgctttagcacaaatacagaaatagtagcaggtgca

SEQ ID NO: 16380 - RNA, 179 nt, unidentified
  source 1..179: mol_type = other RNA; note = Related to QUMM01000064.1; note = Lachnospiraceae bacterium OF09-6
tgcatctgctagaaatcgaaaggacagtggactttcataggaataaagctgcttaatatattaggatgaaacatgtacaacatgtttatcctaatatgttggcattgcaacatatattcgctacaatctataatgattgtagcgacggattttcaaatacagaatgggtaacaggtgca

SEQ ID NO: 16381 - RNA, 205 nt, Dorea longicatena
  source 1..205: mol_type = other RNA; note = Related to QVIB01000063.1
tatattggctagaaatagaaaatcaagttgattttcataattgtaaagtgtcttacatttattatcagtaaaagactaacgttcttttactgatagtaaagtgatttcgcaacgggggttgctcaatcactttactatctttataattcattgcttgacaatgatttataaagataattttcagttaggttaggtagcttgtata

SEQ ID NO: 16382 - RNA, 207 nt, Roseburia hominis
  source 1..207: mol_type = other RNA; note = Related to JAGZKG010000016.1
tatatttgttagaaaaagaaaatcaagttgattttcaaagcgaaaatgtttcatacgtttattatcaggaaaagggtaatgctcttttcctgatagtaacgttatgctcgcaggagcaactgctctcataacgttactatcattacaactgattggttgacaatcagttgtaatgagaattttcaattagatggggtagcaaatata

SEQ ID NO: 16383 - RNA, 157 nt, Adlercreutzia muris
  source 1..157: mol_type = other RNA; note = Related to NZ_CAKODJ010000004.1
gccagtgtctagaaggcgggaggcaagttgtctctcatagtggcaatgcgcttttcagagaccaggcttttgagcagagcccaaaagcctgcgcgcgaagtggcgcgccagaagcgaagcttcaggtctttcaaaaacagataaggtagacactggc

SEQ ID NO: 16384 - RNA, 257 nt, unidentified
  source 1..257: mol_type = other RNA; note = Related to JAFXDF010000036.1; note = Clostridia bacterium
agcagtgtctagaaaatgagcgactagttgttgctctatgattcaacggcacttgaagccatatgtgtgtggcggcagtgggcggcctaaaggctcgcgaccacttgcctagccgcacacatatcatatggcttcgccagacgataccaataatgacatacgattatcgagataatcgtatgtcaggcgtaccgcctgctatataccgtgctggcgcacggtatatagcataactatcagtttaggtagatgctgct

SEQ ID NO: 16385 - RNA, 257 nt, unidentified
  source 1..257: mol_type = other RNA; note = Related to JAFVRR010000006.1; note = Clostridia bacterium
atcaacacctagaaatcgaaaaacgagtagtttttcttattaacaaaggtactttgttcacaaacgcaagcgtttgttatgttatttcctcaaggaatacattcctatcgtaaataacatatcaaatagtggcggtgggcacaaattttgcgttggtaaaccaatcgcaaaatatttgtgcttccacgcttgctcaccatttgaagttatggcattgccaaaccaatataaaatttaaagataaagtaggtgttgat

SEQ ID NO: 16386 - RNA, 183 nt, Paenibacillus sp.
  source 1..183: mol_type = other RNA; note = Related to NZ_CP075175.1
gagatcttctagattagaataacgagtcgttattcgatgatagtaaggggactttttgctcggggaagaaaatctccgccgctccgcttgctacaatcttctcccccgaacaataagaaaagcacttattgttctttctaattaaagtgtgtgtgctaggccataaaatgggtagaaggtctc

SEQ ID NO: 16387 - RNA, 202 nt, Rossellomorea arthrocnemi
  source 1..202: mol_type = other RNA; note = Related to NZ_CAJGBF010000001.1
tatgttttctagaattgaatagcgagtcgctattcgtgatgtaaagttactatgtagctgtatcagtactaattttgaagagcgaaaattagtactgaaccaacaaagaagagcgctttgtcggttcaccataacaaaatccctgaggtcaaggatttcgtgatggtgatcagttaaattaaataatccagtagaaaacata

SEQ ID NO: 16388 - RNA, 202 nt, Sutcliffiella horikoshii
  source 1..202: mol_type = other RNA; note = Related to NZ_VTEU01000001.1
tatgttttctagaattgaatagcgagtcgctattcgtgatgtaaagttactatgtagctgtatcagtcctaattttgaagtgcgaaaatttggactgaaccaacaaagaagaccgctttgtcggttcaccataacaaaatccctgaggtcaaggattttgttatggtgatcagttaaattaaataatccagtagaaaacata

SEQ ID NO: 16389 - RNA, 196 nt, Exiguobacterium sp.
  source 1..196: mol_type = other RNA; note = Related to NZ_JACSLM010000003.1
tatgttttctagaattgaacagcgagtcgctgttcgtgaattaacgttacttagtagctgtcactgcacaatttttcctgaaaaattgtgctgtaacaacaaagaagttcactttgttgttcatcaccgtgaattatcgaggtcgagaattcacggtgatggatcagttaattaaacaaatctagtagaaaacatg

SEQ ID NO: 16390 - RNA, 203 nt, Cytobacillus luteolus
  source 1..203: mol_type = other RNA; note = Related to JADCLJ010000021.1
agtgtcttctagaattgaatagcgagtcgctattcgtgaagttaagttactatgtagctgtctcagtactaattttgaaaagcgtaaaattagtactgaaacaacaaagaagagcgctttgttgtttcaccataataaaatcttagaggtcaaagattttattatggtgatcagttaaattaaataatccagtagaagatatt

SEQ ID NO: 16391 - RNA, 200 nt, unidentified
  source 1..200: mol_type = other RNA; note = Related to VENA01000064.1; note = Firmicutes bacterium
catgttttctagaattggatagcgagtcgctattcgtgaagtaaagttactatgttgctttttcagtactaattttagaagcgtaaattagtactgaaacaaccaacagaagcatttggttgttcacctaaataaaatattagaggtcaaagattttatttaggtgatcagttaagtaaagaaatctagtagaaaacaat

SEQ ID NO: 16392 - RNA, 175 nt, Alkalihalobacillus pseudalcaliphilus
  source 1..175: mol_type = other RNA; note = Related to LFJO01000006.1
gttgttttctagaattgagcagcgagtcgctgttcgtgaagtaaagttactatgtatctatgatactaattttcaagagcgtaaaattagtatcatacaacaaagaaaatcactttgttgtatacaccagtaaacgtggtgtataggtaaattaaataatccagtagaaaataac

SEQ ID NO: 16393 - RNA, 177 nt, Rhodococcus qingshengii
  source 1..177: mol_type = other RNA; note = Related to SMZU01000020.1
tgtattttctagaattgagtaacgagtcgttactcgtgaagcaaggttactttgtggcaaatgaccttgtttagaagagcactaaacaaggtcatcccccaaagaagatcgttttgggggatgaggaaaaagaaaccttcctcagtagttaattggaaagaaccagtagaaaatatt

SEQ ID NO: 16394 - RNA, 178 nt, Carnobacterium maltaromaticum
  source 1..178: mol_type = other RNA; note = Related to NZ_CP045040.1
aaaatttgttagagtgtctgaaaagcgagtcgcttttctaagaacttaagttcctaaatagcaaaacatgcttgaacaaagtgcgtccaagcatgcttcgctaaagctccgacagtaatttgattatttccgaaggtctcaataataaattactgttttgaaaaatttaagaaatatt

SEQ ID NO: 16395 - RNA, 178 nt, Listeria newyorkensis
  source 1..178: mol_type = other RNA; note = Related to KQ130593.1
taactttgttagagtgtctgaggagcgagtcgctcctctaagaattaaaatttctaagtagcaaaacaagcttgcgccaaggcccaagcttgctcgctctgctccgcagtagttagattatttccgaaggtctcaataactaaactactgttttgaaaaattaatgaactattagtta

SEQ ID NO: 16396 - RNA, 179 nt, Bacillus safensis
  source 1..179: mol_type = other RNA; note = Related to NZ_CP084677.1
tgtaagaaaggcgagtcgcctttcgaataagcaacgttacaaaattctgaattagcaaacaaatcgagatttgtttgctaatttgaaacggaaagcgcgtttcaaattacctaacttataagttgaggttcaaacttctcaagttaggtaattaaataatgaaagattcaatgggttca

SEQ ID NO: 16397 - RNA, 167 nt, Paenibacillus sp.
  source 1..167: mol_type = other RNA; note = Related to JABBEA010000018.1
agctgtgactagacttttagcaagtgctaatcgaagtaagtatctattttatttcttacttcaaaccataatgataattctgcaaaaaccgcagaatcatcatcacctttaaattaagaactaaaatctagcagtctccttaatttaaaggtgaggtagtcactaaa

SEQ ID NO: 16398 - RNA, 153 nt, Pontibacillus yanchengensis
  source 1..153: mol_type = other RNA; note = Related to NZ_AVBF01000002.1
atgggtgactagacttttagcaagtgctaatcgaagtaagtatgtattgaattcttatttcaaaagagaaatggtaattctgtagaaaccaacagaatcaccatacccctttaaattaacaattcataatttaaaggggaggtagtcacctaa

SEQ ID NO: 16399 - RNA, 168 nt, Bacillus cereus
  source 1..168: mol_type = other RNA; note = Related to JH792149.1
agtggtgactagacttttagcaagtgctaatcgaagtaagtatgtatttaattcttatttcaaaaccataatgatgattctgcccaaaattgcagaaccatcctcacctttaaattaagaattaaaaccctaagagcttcttaatttaaaggtgaagtagtcactaaa

SEQ ID NO: 16400 - RNA, 166 nt, Amphibacillus marinus
  source 1..166: mol_type = other RNA; note = Related to NZ_FODJ01000007.1
gatggtgactagacttttagcaagtgctaatcgaagtaagtgtgtacttaattcttacttcaatatcaatgataattctgcaaaaagcgcagaatcatcattcacctttaaattaagaattaaaaccttaagagcttcttaatttgaaggtgaagtagtcactatt

SEQ ID NO: 16401 - RNA, 165 nt, Bacillus subtilis
  source 1..165: mol_type = other RNA; note = Related to CP035226.1
gttggtgactagacttttagcaagtgctaatcgaagtaagtatgtatttaattcttatttcaaaatcaatgataattctgcaaaaaccgcagaatcatcatcacctttaaattaagaattaaaaccttaagagcttcttaatttaaaggtgaagtagtcactaaa

SEQ ID NO: 16402 - RNA, 168 nt, Planococcus koreensis
  source 1..168: mol_type = other RNA; note = Related to JACHHE010000004.1
aatagtgactagacttttagcaagtgctaatcgaagtaagtatgtacttaattcttacttcaaaaccctaatgataattctgcaaaaagacgcagaatcatcatcacctttaaattaagaattaaaacactaaaagcttcttaatttaaaggtgaagtagtcactaaa

SEQ ID NO: 16403 - RNA, 171 nt, Bacillus toyonensis
  source 1..171: mol_type = other RNA; note = Related to NVGO01000019.1
tatagtgactagacttttagcaagtgctaatcgaagtgagtatgtattaagtcttacttcaaaacataagtacaattctgctccgcttctcttcgcaggatcgtactcacctttaaattaagacttaaaacctaaaaaacgtcttaatttaaaggtgaagtagtcactata

SEQ ID NO: 16404 - RNA, 135 nt, Companilactobacillus nantensis
  source 1..135: mol_type = other RNA; note = Related to BJZH01000076.1
gagggtagttagcaatctatagcaatgtgctatagtaggtagtttctatcttaatcagtgatgtcatcaaactgaaagcgagtttgatgacggctctgtttaagaaggacgcttaaacagaccgtaactaccctt

SEQ ID NO: 16405 - RNA, 150 nt, unidentified
  source 1..150: mol_type = other RNA; note = Related to SVLF01000041.1; note = Oscillospiraceae bacterium
gaaacgcattagcctgaggtgtattcgcctcatatacagaacggcactaactctcatacagaccagcgaaacctgccttccttcgcgcgttgttttcgctgttctgtatgcgacaagaataagtaaaataagtttttcgtaatgcgtttc

SEQ ID NO: 16406 - RNA, 150 nt, unidentified
  source 1..150: mol_type = other RNA; note = Related to JAFSGO010000067.1; note = Clostridia bacterium
ggagaccgttagctaagaggtgtattcgcctcgtgttaagaacggcactaacagatgttgctgagcgcttacgcgttctcttcgttctctttgtaaccgctctgcaacatcgaatgtttgaatttagtttcattttacgtagcggtctcc

SEQ ID NO: 16407 - RNA, 132 nt, Ruminococcus flavefaciens
  source 1..132: mol_type = other RNA; note = Related to NZ_JHXF01000028.1
gacattcaatagcatgggagcgattcgccccaataaagaaaggcacttactttatctaacaaatccgtcactacgttccgtatttgttagataagcgtcgcaaacgacgctttgattttcgtattgaatgtc

SEQ ID NO: 16408 - RNA, 153 nt, Anaerotruncus colihominis
  source 1..153: mol_type = other RNA; note = Related to NZ_CP094682.1
gggaacgatcagaccggggtgaattcgccccttgatcaaacggcactaaccactgtttgccgtgcgtgcgtcttgttcatttcattctctgcgacgcacgcacggcaaacagacagatccattattattacaatttatttagtgatcgttccc

SEQ ID NO: 16409 - RNA, 145 nt, Dorea longicatena
  source 1..145: mol_type = other RNA; note = Related to CABHNM010000079.1
aagagtaattgaattgaggtgtagtcgcctccttgatgaaggtggctaacatccgagcggaacaggttgctcgctcattgcattcgttcgtaacctgccccgctcgaatgattttggtcgcttttatgatactacaattactctt

SEQ ID NO: 16410 - RNA, 152 nt, unidentified
  source 1..152: mol_type = other RNA; note = Related to JAFVDW010000052.1; note = Lachnospiraceae bacterium
aagagtaactggattgaggtgtagtcgcctccttgagcaaaggcactaacatcgcaatagaatcaacttgttcgccgcatagggcttcggcgaacaagtcgtttctattgcgttgcgtggtgaaagcattgatttattaagcagttactctt

SEQ ID NO: 16411 - RNA, 122 nt, Cellulosilyticum lentocellum
  source 1..122: mol_type = other RNA; note = Related to NC_015275.1
aagagcaactagattgaggcgattcgcctccttggaaaagggtactaagtttctgtcgcacaccaatttataagcttataaattggtgtgcgacagaaatgaaataaatagtagttgctctt

SEQ ID NO: 16412 - RNA, 144 nt, Coprococcus sp.
  source 1..144: mol_type = other RNA; note = Related to QULM01000001.1
agggataactagattggggtgcattcgcctccttgcaaaacgtaactaactctttaatttacaaagccactttgcgtgaaaagcatacgcaaagtggcttgcaaatcaaagatttgcaagttccaatttcaagtagttgtccct

SEQ ID NO: 16413 - RNA, 128 nt, unidentified
  source 1..128: mol_type = other RNA; note = Related to AP018794.1; note = Lachnospiraceae bacterium KM106-2
ataagcagctagaagtgagagcgagtcgcctctataaagaacggtactaactctctaaattttacggcctttacctgcggtaaagcccgatagatctagagaagttaccatgacaggtagctgctttt

SEQ ID NO: 16414 - RNA, 154 nt, Vibrio sp.
  source 1..154: mol_type = other RNA; note = Related to JAJSDZ010000009.1
cctttagcgagttgttttttgagaaatccaaaatacaactgggtagtgattcgctgtccttcaactaaaccggaacattggctcatttagttcttgctcgctgaaacttcgtttcagactcgcaaggtctaaacgagaacttttgacgtaaagg

SEQ ID NO: 16415 - RNA, 155 nt, Vibrio parahaemolyticus
  source 1..155: mol_type = other RNA; note = Related to MIQX01000067.1
cctttagcgagttgattttcgaaaaagtcgggaatacaactgggtagtgattcgctgtccttcaggaaaacagatatattagctcatttagttcttgctcgctaaaacttcgttttagactcgcaagttctaaatgtgaacttttgacgtaaagg

SEQ ID NO: 16416 - RNA, 157 nt, Providencia rettgeri
  source 1..157: mol_type = other RNA; note = Related to CP076406.1
cctttagcgagttggtttttgagaaatcaggaattcaactgggtagtgattcgctgtccttcaattaaactggttaaatggctcatttagctcttgctcactaaaacaccccggttttagattcgcaagttctaaatgagaacttatgacgtaaagg

SEQ ID NO: 16417 - RNA, 154 nt, Pseudoalteromonas sp.
  source 1..154: mol_type = other RNA; note = Related to NZ_WTLA01000004.1
cctttagcgagttgttttctgataaatcagaaatacggctgggtagtgattcgctgtccatcagttaagccattaaattgacgtatttagttcttgctcgctaaaactacgttttagactcgcaagttctaaattcgatattatgacgtaaagg

SEQ ID NO: 16418 - RNA, 155 nt, Shewanella psychromarinicola
  source 1..155: mol_type = other RNA; note = Related to CP034073.1
cctttagcgagttgttttttgaaactatcaataaagcaactgggtagtgattcgctatccttcaacaaaaccagatgaatagctcatttagttcttgctcgcaaaaactccgtttttgactcgcaagttctaaatgcgaacttgtgacgtaaagg

SEQ ID NO: 16419 - RNA, 155 nt, Colwellia sp.
  source 1..155: mol_type = other RNA; note = Related to JAESPX010000111.1
cctttagcgagttgtatttcgaaaaattaggaatatcaactgggtagttgtttcgctgtccttcaattaaactggtttattaactaattaagttcttacccagaaaaacttcgtttttcagtgcaaggtcttaattagatcttatgacgtaaagg

SEQ ID NO: 16420 - RNA, 143 nt, Enterobacter kobei
  source 1..143: mol_type = other RNA; note = Related to FKGF01000007.1
cctttagcgagtgaattttcactgaacagtgcttcgctgttccgcaacaaaactggtgtaatgccggctcttaatgttcggagccgcacgctcctcgcgtgctgatccgaacattaatctcctatgatcttttggcgtaaagg

SEQ ID NO: 16421 - RNA, 145 nt, Acinetobacter baumannii
  source 1..145: mol_type = other RNA; note = Related to DADBIP010000003.1
cccttagcgagtgagcgtaatactcactggatagtgattcgctatcctgcaattaatcttttacaatgctttatttaaagctacccagcaataaacgccccgtttattgccatgtacctttaaataacttcttatgacgtaaggg

SEQ ID NO: 16422 - RNA, 143 nt, Herminiimonas arsenicoxydans
  source 1..143: mol_type = other RNA; note = Related to CU207211.1
cctttagctagtgaatgaaaattcactggatagtgtttcgctatcctgcattaaatccaagtcaatgccgtatttaattgttcctctcaaccatcgcccgatgtttggtcggaacacttaaatcgattctttagccgtaaagg

SEQ ID NO: 16423 - RNA, 143 nt, Idiomarina sp.
  source 1..143: mol_type = other RNA; note = Related to SNWT01000002.1
cttttagcaaacagacgtcagtctgttggacggcgcttcgccgccctagtaataatctagtgtctgctgttttaaaatctgtacctcaagtatctctcgatacttgatctacaccttttaacacatttctttagacgtaaaag

SEQ ID NO: 16424 - RNA, 144 nt, Aeromonas veronii
  source 1..144: mol_type = other RNA; note = Related to NZ_CP047155.1
cccttagcgagtgaaccttggttcattggatagcgtttcgctgtcctgcacacaatctgagctattgctgcatttaactgtgcagagccagaaacatccgtttcttgatctgcacagttaaacttgatacttaagacgtaaggg

SEQ ID NO: 16425 - RNA, 142 nt, Colwellia sp.
  source 1..142: mol_type = other RNA; note = Related to JAHKPR010000010.1
tccttagcgagtgaggtcaaactcactgggtagtgtttcgctatcctgcacataaactagaacaatgccgcatataaatatgcagaacaagcgactcgtcgcttgagctgcatttttatatccagaacttaagacgtaagga

SEQ ID NO: 16426 - RNA, 149 nt, Vibrio parahaemolyticus
  source 1..149: mol_type = other RNA; note = Related to CP006004.1
cccttagcacatagtgtactttttgttcactggatagcgtttcgctgtcctgtactaaatccagttcaatatcgtatttcactgtgccgagcaagaagacattcgtttcttgaacggcacagtgaaattcgtaaatttagacgtaaggg

SEQ ID NO: 16427 - RNA, 148 nt, Vibrio aphrogenes
  source 1..148: mol_type = other RNA; note = Related to NZ_AP018689.1
cccttagcgaatgagcttacttagttcattggatagcgtttcgctatcctgcatacaatctgattcaatgccgcatgaaaatgtgcagagccagaatacagtagtttctggaactgcacattttcatccgcgacttaagacgtaaggg

SEQ ID NO: 16428 - RNA, 146 nt, Proteus sp.
  source 1..146: mol_type = other RNA; note = Related to NZ_CP034105.1
cccttagcgaatgaacataatgttcattggatagcgtttcgctatcctgcacataatctgattttatgccgtatgaaaatgtgcatcaccagaataccgtagtttctggatctgcacattttcctccgcgtcttgaggcgtaaggg

SEQ ID NO: 16429 - RNA, 146 nt, Paraglaciecola agarilytica
  source 1..146: mol_type = other RNA; note = Related to NZ_BAEK01000003.1
tctttagcgagtgggtgaatagccctctggatagtgtttcgctatcctgcgaacaatcttgcaccatgccgaatgtaatggtgcctagaaagaaaaagtcttttcttgtccaggcaccattacatccgtttcttaagtcgtaaagg

SEQ ID NO: 16430 - RNA, 145 nt, Nitrosomonas sp.
  source 1..145: mol_type = other RNA; note = Related to FOFX01000033.1
cctttagcgagtgggtgctaaactcactgggtagagtttcgctatccgacactaaatctagaatcatgccgtatatatacttgcttcacaatcatctcccgatgattgatcagcaagtttatatccgatacttatgacgtaaagg

SEQ ID NO: 16431 - RNA, 145 nt, Rheinheimera tangshanensis
  source 1..145: mol_type = other RNA; note = Related to BMLH01000001.1
cctttagcgagtgggtcaagtactcactgggtagtgtttcgctatcctgcactaaatccagaagcatgccgtatataaatatgctgcacaatcatcgctcgatgattgcaccgcatttttatatccgattctttagacgtaaagg

SEQ ID NO: 16432 - RNA, 145 nt, Halomonas sp.
  source 1..145: mol_type = other RNA; note = Related to NZ_VBVC01000001.1
cctttagcgagtgggcttagcgctcactgggttgcgcttcgcttccctgcacgaaatctggagctttagcgtatctaaagctgcggcacaatcatctctcgatgattgcaccgcgtctttatatccgtttcttaagacgtaaagg

SEQ ID NO: 16433 - RNA, 149 nt, Escherichia coli
  source 1..149: mol_type = other RNA; note = Related to UGCT01000004.1
cccttagcgagtggcttctccggaagttcactggacagtgtttcgctgtcctacatacaatctgaagttttaccagttccctcattgaaaggagaacatctcccgatgttctcctttcacttcggaatctgatttttatgacgtaaggg

SEQ ID NO: 16434 - RNA, 178 nt, Serratia oryzae
  source 1..178: mol_type = other RNA; note = Related to NZ_SOZF01000025.1
cccttagcgagtagttttctgatgatagctgctggatgcggtttaatgatgagggctactggatagtgtttcgctgtcccacacaaaatctgaagtactgccagtccctacagttgcacgaagaacatcccctgatgttcttcgtgaacttcgggagctgttttttatgacgtaaggg

SEQ ID NO: 16435 - RNA, 147 nt, Pectobacterium sp.
  source 1..147: mol_type = other RNA; note = Related to NWTM01000001.1
cccttagcgagtcccttgtaagaggtgactggatagtgtctcgctgtcctgcattaaatctactgttttggcagtttacctcgaactcagagaacatctcccgatgttctctgagagcgaggaaacctggtatttatgacgtaaggg

SEQ ID NO: 16436 - RNA, 157 nt, Serratia liquefaciens
  source 1..157: mol_type = other RNA; note = Related to NZ_CP033893.1
cccttagcgagaggcttaccattcgtgggaacctctggatgctgattcggcatcctgcatgtaatctgagttactgtctgctttccttgttggaacggagagcatcgcttgatgctctccgagccaaccaggaaacccgtcttttttgacgtaaggg

SEQ ID NO: 16437 - RNA, 155 nt, Klebsiella quasipneumoniae
  source 1..155: mol_type = other RNA; note = Related to NZ_CAAGXM010000002.1
cccttagcgagaggtacttcattcgtgattgcctctgggcgttgtttcggcgtcctgcaactaaactcagtttctgtctgctttccttgtggaacggagagcatcagtggatgctctccgagccacaatgaaatccgttttttttgacgtaaggg

SEQ ID NO: 16438 - RNA, 160 nt, Serratia ureilytica
  source 1..160: mol_type = other RNA; note = Related to JADTXC010000013.1
cccttagcgagaagtgacttcatgataaaatgagccactttctggatagtgcttcgctatcctgcatttaatcttgttcaatagcagctttcgatgtgaacgacgaacacctctccgtgttcgtcgatcacatcgaaatcagtaacttaaggcgtaaggg

SEQ ID NO: 16439 - RNA, 161 nt, Yersinia frederiksenii
  source 1..161: mol_type = other RNA; note = Related to NZ_CGCI01000022.1
cccttagcgagaggtagtgatcatttagttgtgagctactttctggatagtgattcgctgtcctgcatttaatctgattcaatagcagctttcaatgtgaacgacgacgacctctcggtagtcgtcgatcacatcgaaaaccgaaacttaaggcgtaaggg

SEQ ID NO: 16440 - RNA, 142 nt, Advenella mandrilli
  source 1..142: mol_type = other RNA; note = Related to NZ_JAENGP010000011.1
tctttagccgagcgagttgttctcgctggatagtgtttcgctgtcctgcattaaatccaactttatgccgcatgcaaatcttcacaatacctcgcctgaggtattgcctcagatttgcatacgtgcttttaagacgtaagga

SEQ ID NO: 16441 - RNA, 149 nt, Aeromonas hydrophila
  source 1..149: mol_type = other RNA; note = Related to NZ_CP065651.1
tctctagcgagtgggaatttcccgctggatggtgtttcgccatcccacagataatccagaccattgttggccaatgagtttcaatgtgcggagcaagcgctaccgcgcttgaaccgcacattgaaacgagtattcttaagccgtagaga

SEQ ID NO: 16442 - RNA, 141 nt, Cellvibrio sp.
  source 1..141: mol_type = other RNA; note = Related to NZ_BBUL01000097.1
cctttagcgagtgagcatgctcactggatgttgattatcgccatcctacacaaaaccattgtcaatgcggcttaatttgactatcgaagcacgttccgtgcttcaacagtcaaattaacccatatctaagttacgtaaagg

SEQ ID NO: 16443 - RNA, 156 nt, unidentified
  source 1..156: mol_type = other RNA; note = Related to JAESQK010000141.1; note = Crocinitomicaceae bacterium
tctttagcgagaggtctagcaatagatcgctagtggatggtgtttcgccatcccaagggaaagctgttggatcggcgagagttttctcgggaaaactctcgtccctcaagttctcccgagaaagctctcttccgcaccaattttgtgacgtaaaga

SEQ ID NO: 16444 - RNA, 141 nt, Flavobacterium sp.
  source 1..141: mol_type = other RNA; note = Related to NZ_JAGFBU010000005.1
attttagacgtgttttcattaatacgcgtggttgttgttccgacaatcgagttttaaactcatttttatcatcacaaattttaaacagaaaatcaaaatgatttcctatttaaatttcgctcaagaattttgatgtaaaat

SEQ ID NO: 16445 - RNA, 152 nt, Flavobacterium swingsii
  source 1..152: mol_type = other RNA; note = Related to NZ_FOJT01000006.1
attttagacgcgatttgtatttatatatttcagcgagtggttgttgttccgacaaccgagttttaaactcatttttataatcgcaaattttaaattagaaaatccggtaggtttgctaatttaaatttcactcaaatgttatgaagtaaaat

SEQ ID NO: 16446 - RNA, 140 nt, unidentified
  source 1..140: mol_type = other RNA; note = Related to JABHCC010000144.1; note = Bacteroidetes bacterium
tttttagacgttgtttatcagcgagtgggtgttgttccggcacccgagttttaaactaagctttattatcgcaaattctaaatttttaaatccagttggtttaataatatagaattcactcaaattttgagaagtaaaaa

SEQ ID NO: 16447 - RNA, 160 nt, Flavobacterium sp.
  source 1..160: mol_type = other RNA; note = Related to NZ_VOGZ02000014.1
tttttagacgcttagtaaattgtgttatgcaattgaaaatgcgagtggatgttgtttcggcatccgagttctaaactcaactttatcatcgcaaactttcatcgcaaagcttcaatgaagcttcacaatgaaacttcactcaaaaattgtgaagtaaaaa

SEQ ID NO: 16448 - RNA, 131 nt, Flavisolibacter ginsenosidimutans
  source 1..131: mol_type = other RNA; note = Related to NZ_CP042433.1
tttttagacacttcggtgagtgaatgttgttccagcattcgagtttaaaactaaccattataatcacgaatttttgatacaaatccagttggtttatatcaaaacttcgttcaaatgtaaagtagtaaaaa

SEQ ID NO: 16449 - RNA, 131 nt, unidentified
  source 1..131: mol_type = other RNA; note = Related to JACRII010000139.1; note = Planctomycetes bacterium
tttttagacacttcggtagtggatgttgtttcggcatccgagttttaaacaaaactttatcatcgcaaatttatatgtttctttgtttcctcagaaacatataaattcactcaaatgttttgaagtaaaaa

SEQ ID NO: 16450 - RNA, 134 nt, unidentified
  source 1..134: mol_type = other RNA; note = Related to SEFI01000651.1; note = Sphingobacteriaceae bacterium
tttttagacacttcggtggtgggcgctgttccggcgctcgaggctaaaactcagctttattatcgcaaaattcctctctttcctcctgaacgtcgcaaagagaggaatttcactcaaaatttttgaggtaaaga

SEQ ID NO: 16451 - RNA, 158 nt, Crocinitomix catalasitica
  source 1..158: mol_type = other RNA; note = Related to NZ_JHXV01000023.1
tttttagacgctttttgttgcgttatgtaattaaaaagtgagtgagtgttgttccgacactcgagttataaacctagatactatcatcgcaaattttaagtgcaaaatccagtaggttttacacttaaatttcactcaactattgagaagtattaaga

SEQ ID NO: 16452 - RNA, 144 nt, Pedobacter sp.
  source 1..144: mol_type = other RNA; note = Related to JAJMPA010000005.1
attttagacatttggtttaccaaatattgggacgttgtttcggcgtccaagaattaaacttagctttatcttccaaaagtatgaagctattgactcgattcctcgcaacatcttcatacttccgtctagtattatgagtaaaaa

SEQ ID NO: 16453 - RNA, 131 nt, unidentified
  source 1..131: mol_type = other RNA; note = Related to WPIF01000004.1; note = Nitrospirae bacterium
tctttagtcgcttcggcgagatgttgattcgacatccaaggtgtaaactaactattgtcttcatgaagttggcactttaatctctcaacgagattaaagtggaacttcattcaagaattttgaggtaaaga

SEQ ID NO: 16454 - RNA, 134 nt, Epilithonimonas zeae
  source 1..134: mol_type = other RNA; note = Related to NZ_FSRK01000003.1
tatttagaccattttttggagaatagtggttcgctattcgagaagtaaaactatattttatttgtgcaattaaaataatttcctgcgggcactcgaaaattattttaatcacgtaagactttagaaagtaaata

SEQ ID NO: 16455 - RNA, 148 nt, unidentified
  source 1..148: mol_type = other RNA; note = Related to JAIBBL010000001.1; note = Ignavibacteria bacterium
attttagaaaagttctttttagtcgtatgttgggtgttgttcacgacacccctgatcaattgcaacatttagtttcgaaaacttttaatgtaaatgcaggcacagctgatttacattaaaacttctctcaagaattaagaagtaaaaa

SEQ ID NO: 16456 - RNA, 154 nt, Nitrospina sp.
  source 1..154: mol_type = other RNA; note = Related to JABHDM010000238.1
ttcttagccagaccaagctgggttgccattttggtctgagcggtgattcgccgctctagatgaaaactttggtttatcgtattaatgtttaattgcttctacctcagtttgaggtaggcgcattaaacattaacaattatttttgaagtaagaa

SEQ ID NO: 16457 - RNA, 122 nt, unidentified
  source 1..122: mol_type = other RNA; note = Related to JACDNW010000012.1; note = Candidatus Marinimicrobia bacterium
attttagtcggctattatagcctgggcagtgttttcgctgtccgtgaagaaaactcctcactgtttctctcaaattatgccctctcgggcataatttgagagtcggatttatgaagtaaaat

SEQ ID NO: 16458 - RNA, 123 nt, unidentified
  source 1..123: mol_type = other RNA; note = Related to JAHJJL010000216.1; note = Candidatus Eisenbacteria bacterium
gctttagtcggtcgcttgcgacctgtggacgatgattcgtcgtccgaggtggaaacagagcattattgcggtcaaattgcgacttatggtcgcaattcaaacgcttctcttgtgaagtaaagt

SEQ ID NO: 16459 - RNA, 134 nt, unidentified
  source 1..134: mol_type = other RNA; note = Related to QQUH01000007.1; note = Chloroflexi bacterium
cccttagacgatgcttgcatcagtgggtgatgattcgtcgcccgaggctaaaaccagttcattatttgcaagcgaacacccaccatggctccgccatggattaagttcgcttgcattggtggttgaagtaaggg

SEQ ID NO: 16460 - RNA, 136 nt, Bacillus sp.
  source 1..136: mol_type = other RNA; note = Related to WBOQ01000050.1
tacttagaaccaagctttttttggatagtgtttcgctatccacagttaaaactcgtgtttaacctacgcaataaacacacaatgagtatcgccatactcattgaatgtttattgctcggattatttatggtaagta

SEQ ID NO: 16461 - RNA, 142 nt, Bacillus toyonensis
  source 1..142: mol_type = other RNA; note = Related to JAIUXW010000030.1
tacttagaaccaagctttttttttggggatagtgattcgctatccttagttcaaactcgctattaaccttatatcaataagcacacaatgagtatagccatactcatcgtgcacttattgaccggattatttatggtaagta

SEQ ID NO: 16462 - RNA, 135 nt, Bacillus cereus
  source 1..135: mol_type = other RNA; note = Related to NTXH01000057.1
tgcttagaaccaagcttgttaaaggatagtgtttcgctagcctagtaaaatctctgttatacctatatcaataacagaaaatctatatctccatatatattttctgttattgatcgagactatttatggtaagca

SEQ ID NO: 16463 - RNA, 136 nt, Terribacillus saccharophilus
  source 1..136: mol_type = other RNA; note = Related to NZ_NPBP01000019.1
tgcttagaaacctacttttaccgatagtgattcgctatcgtagtaaattacatgcttttcaaccatggctgttaaaccccctcgtttcaccaggaaacaagttgatttaacagccaaggcttacttatggtaagta

SEQ ID NO: 16464 - RNA, 137 nt, unidentified
  source 1..137: mol_type = other RNA; note = Related to JIBW01000002.1; note = Bacillaceae bacterium JMAK1
tgcttagaaatcaatattaatcgatagtgttccgctgtcgtagtttataaatcgcttttaaccattactgttaggaacaaattgcttcctccgaaccaatattgatcctaacagcaaaggcttatttatggtaagtg

SEQ ID NO: 16465 - RNA, 138 nt, Bacillus subtilis
  source 1..138: mol_type = other RNA; note = Related to PYWO01000004.1
tgcttagatatcattaatttaagaacagtgtttcgctgttctagtatattaacatctttttttctttctatgataaacacaacgctattcaacctgaatatcgttgcatttatccaagaagtttatttatggtaagca

SEQ ID NO: 16466 - RNA, 171 nt, Ornithinibacillus sp.
  source 1..171: mol_type = other RNA; note = Related to NZ_JAGXBY010000001.1
ggcttagttaatattatttttctttttacatattacaatttagaaggaaaataataggagtagtgattcgctattctttaattaaacttcaggtttagcttttaaacaaatatgcggctatattttccaaatatcccctcacatttgtttaaaatgtccttagggtaagcc

SEQ ID NO: 16467 - RNA, 131 nt, unidentified
  source 1..131: mol_type = other RNA; note = Related to QBUM01000164.1; note = ANME-1 cluster archaeon GoMg2
atctcagatgagcttcggctagaggatggtgcttcgccatcccagatgaaatcgcctccattgtttcgattgaatcttacgtacaggcctcctgtacgcaaccttcaatccactgtattttagagtgagat

SEQ ID NO: 16468 - RNA, 131 nt, unidentified
  source 1..131: mol_type = other RNA; note = Related to MGVG01000053.1; note = Elusimicrobia bacterium RIFOXYA2_FULL_53_38
aatttagaaagagagggggtggtgccttcgccgccctaggtgcagaacatcctagaagttccgctagaattcagccaatctcgcagtagcagcgattggatgaattctagcagtatgtttgtgagtaaatt

SEQ ID NO: 16469 - RNA, 149 nt, Clostridium chromiireducens
  source 1..149: mol_type = other RNA; note = Related to MZGT01000125.1
ggcttagaacgttaaggtgcatttctttaactgggtagtgtttcgctactctggatggatactgaatattattttagtaaacaatcatgcttcttaaaagagcaattttaagaagcacaattgtttactaatagctaattgtgtaagct

SEQ ID NO: 16470 - RNA, 169 nt, Laribacter hongkongensis
  source 1..169: mol_type = other RNA; note = Related to JAJAXF010000024.1
tctctagcgggcctaaccaagttcaagccgagcttgcaacaaggttcaagccggatagtgcttcgctatccaacactgccgtggtgagatggtcattcccgtataacacggagaatggccccaccattctccgtgttatacgggaatgatagatcttttgtcgtaggga

SEQ ID NO: 16471 - RNA, 179 nt, Paraclostridium bifermentans
  source 1..179: mol_type = other RNA; note = Related to NZ_MWJI01000004.1
tctttagagaacactatttaagttactataggtgcgcatattatatagtacttattgtagttagagatgattcgtctctgttagaatttaagtgtattaatatttcattaattgtttcacttcatccacggtcaagtgaatgaattaaaacaattaattcaaaagatttatggtaaggg

SEQ ID NO: 16472 - RNA, 180 nt, Clostridioides difficile
  source 1..180: mol_type = other RNA; note = Related to CP037830.1
tctttagagaacactgttataagttgctatagatgcgcatgttatatggtacttattatagttagagatgattcgtctctgttagaatttaagtgtatttatatttcgtaattgtttcaatttattcaacattaagtatgaaaaattgaaacaattaactcaaaagatttatggtaagga

SEQ ID NO: 16473 - RNA, 178 nt, Intestinibacter bartlettii
  source 1..178: mol_type = other RNA; note = Related to NZ_CABIXZ010000002.1
cccttagaaaacactatataaatttacaaagcgcgcaaattttgtaagtttatttagttggagatgattcgtctctgtctgaaaacaaagtatactgatatatcattaaatatttgatacatttgtcaatccaacaaatgtatcttcatatttaattcaaagaattaagtggtaaggg

SEQ ID NO: 16474 - RNA, 171 nt, Clostridium tagluense
  source 1..171: mol_type = other RNA; note = Related to NZ_BHYK01000003.1
cctttagagaccactatataatagtattgatcataaaagtactcctatttatagttggagatgattcgtctccctaagtgtttaatttagtagtatcttaattaaatgttccaatccatccacattgtgaatgaattaaaacatttaatcaagaatgatttatggtaaagg

SEQ ID NO: 16475 - RNA, 177 nt, Clostridium botulinum
  source 1..177: mol_type = other RNA; note = Related to JACBEK010000003.1
tctttagagaacactatatgataaatttatttcgcgatataatatttttattattatagttgaggatgattcgtcttcttatgaattaactatagagtatttcaattaaatagctcaaatcatccacagtagtgaataatttaatctatttaatcgaaaaagtataaatggtaaaga

SEQ ID NO: 16476 - RNA, 169 nt, Clostridium sporogenes
  source 1..169: mol_type = other RNA; note = Related to NZ_JZJQ01000041.1
cctttagaaagcactatgttgtagcaataatagtactagctattttcatagtcgaagatgatacgtcttcataagaatttagtagagcattatttaaattaaatcgatgaactcatccacaacagtgaatgacttaatcgatttaatctaaaaagatttatggtaaagg

SEQ ID NO: 16477 - RNA, 169 nt, Clostridium collagenovorans
  source 1..169: mol_type = other RNA; note = Related to NZ_FQXP01000010.1
cctttagaaagcactatgttgtaacaaaaatagtactagttatttgcatagtcgaagatgattcgtcttcataagtatatagcaaaatataatttaaattaaatcgattaattcattcacagctgtgaataacttaaacgatttaatctaaaaagatttatggtaaagg

SEQ ID NO: 16478 - RNA, 150 nt, unidentified
  source 1..150: mol_type = other RNA; note = Related to JAGZKV010000024.1; note = Clostridiales bacterium
ttttcagttaatacatattgcagcgcaatgtgttcggaagatgattcgatcttctttggtgaatggttatacatgattcagccagtttagacgtctaaaccacagaagtggaatagccgtctaaactatatgaaagatttatggtgaaag

SEQ ID NO: 16479 - RNA, 152 nt, Clostridium fessum
  source 1..152: mol_type = other RNA; note = Related to PYLO01000002.1
tttttagtttatacataacgtattattacattgtgttcggaagaagattcttgcttccttggtgtatggtccacatgattcgttatgcttagcagtatagttcatagtcatgaattatccagctaaccctaacgaaaaacttatggtgaaag

SEQ ID NO: 16480 - RNA, 149 nt, unidentified
  source 1..149: mol_type = other RNA; note = Related to JAFQFZ010000002.1; note = Clostridia bacterium
cttttagctattacatattgttttcaatatgttcggaaggcgattcgccttccttggtggatgattccacacgattccttaactttagccgtctatctcacatcgagtgaaatagacaactaaacttaacgaaaagtttctggtaaaag

SEQ ID NO: 16481 - RNA, 161 nt, Pectinatus frisingensis
  source 1..161: mol_type = other RNA; note = Related to NZ_WIQR01000001.1
cttttagtcttgcatattgttatgttaatatgctttggaagatgtttcgtcttcttaggtcttaatgctctcattattccctattgcttaatcgctaatgccacattcgtggcatcatcaactaatcaatagcgaaatgtaagttcggtaatcggtaaaag

SEQ ID NO: 16482 - RNA, 150 nt, unidentified
  source 1..150: mol_type = other RNA; note = Related to PGZR01000048.1; note = Firmicutes bacterium HGW-Firmicutes-4
cctttagatttagcatattaaatttaatatgcgttggaagatgattcaatcttctgtagcgtaacatcgtacatgattagcttaatttaactagatactccacatacgtgaagcatctagccaaattaatcaaaagaattaaggtgaagg

SEQ ID NO: 16483 - RNA, 166 nt, unidentified
  source 1..166: mol_type = other RNA; note = Related to BK019570.1; note = Siphoviridae sp.
cttttagtttttacaattctttatgtaagtctacatattttattgttttggacggtgattcgccagtccttggttaaacgcttactcacaattcgtgatataaaacattttattaaagcacttgtttcaataaaatttttatctcacgaaagacttatggtaaaag

SEQ ID NO: 16484 - RNA, 176 nt, Bacillus thuringiensis
  source 1..176: mol_type = other RNA; note = Related to NULM01000015.1
ctcttagatgttgcacttaattcatatagtgtgcacatatttattatgttttaggtgttgggagatgattcgtcttccagaatggtatattatgcatgatttttcaaaagtaagtgtctaaatccacaaaggtgaattcatacacttacttttaaaaaaaagacttagggtaaggg

SEQ ID NO: 16485 - RNA, 177 nt, Bacillus mycoides
  source 1..177: mol_type = other RNA; note = Related to NZ_CP035996.1
ctcttagacgttacgcttaactcataggttgtgcacatattggttatgttttaggtgttggggagatgattcgtcttccagaattttatatcaagcatgatttttcaaaagtaagcgtttaactccacaaaggtgaagtcatccacttacttgtgaaaaaaagattaaaggtaaggg

SEQ ID NO: 16486 - RNA, 177 nt, Bacillus thuringiensis
  source 1..177: mol_type = other RNA; note = Related to NVKK01000033.1
ctcttagatgttacttcttaattcataaattgcgcatatatttattatgttttaagtagtggaagatggttcgtcttctaaagttttatgtcagacatgatttttcaaaataaatcgtgtaacttcacaaaggtgaagtcacacgattcatttagaaaaaattaccaaaggtaaggg

SEQ ID NO: 16487 - RNA, 178 nt, Bacillus thuringiensis
  source 1..178: mol_type = other RNA; note = Related to NVCK01000005.1
ctcttagatgatactgactaaattcataattatgtacattattttatgatttggttatgtgggagatgattcgtcttctattgtgctaagtgagaactagatttaccagaagaaagtccattacttcaccctcgtgaagcaacaaactttcttctgataaaaggattttaggtaggag

SEQ ID NO: 16488 - RNA, 174 nt, Clostridium tagluense
  source 1..174: mol_type = other RNA; note = Related to NZ_BHYK01000016.1
ctcttagaagttgctaccattacataaaagtgtacataaaatttacgtataggtagtgggggacgtttcgctcttcctatgttcgatgtcaagtctgtatttttaaaagtatccgagttccttaaagacatttaagaaactcaaatacttttcaaaaagtaataagggtaagag

SEQ ID NO: 16489 - RNA, 175 nt, Acetivibrio clariflavus
  source 1..175: mol_type = other RNA; note = Related to NC_016627.1
tccttagatgctactacttttgtataaacgtgcacaatatttatttatatgaaagtagtgggaagtggttcgctttccgaggtgctatgtcaggactatatttaatgaagtaagcgtccaacttcatatatatgaagttagccacttacttcatcaaaaggaataaaggtaagga

SEQ ID NO: 16490 - RNA, 178 nt, Planomicrobium sp.
  source 1..178: mol_type = other RNA; note = Related to VOHC01000030.1
ctcttagatgtcactgattagatgcccaaacatgtacatggttttggagtttagttatgtgggagatggttcgtctcctgttgtgtaaagcaaggaattgattcatcagaagaaggagtaaaactccacgacagtgaagttctccaccttcttcagataaaattgtttttggtaagag

SEQ ID NO: 16491 - RNA, 177 nt, Bacillus thuringiensis
  source 1..177: mol_type = other RNA; note = Related to NFEK01000132.1
cccttagatgtttctattttttctcatagatgtgcacatttatttatgtataaaaatggtcgggggatggttcgtcttcttaagtttaatactaacatgtacttgtagagagtaagtggacaactccacgacggtgaaattctccccttactctctacaaattaataaaggtaaggg

SEQ ID NO: 16492 - RNA, 151 nt, Sporolactobacillus laevolacticus
  source 1..151: mol_type = other RNA; note = Related to NZ_AWTC01000001.1
tttttagaattttctctttgaaacttgaagagtgagaaatggtgattcgccattttaagtgaaatgtgagataacttatttgaataataatcctcacatttacaacgtaaatattcggctcattattcaaatatctaatgactggtaaagg

SEQ ID NO: 16493 - RNA, 179 nt, Thalassobacillus devorans
  source 1..179: mol_type = other RNA; note = Related to BMCJ01000003.1
ttcttagaaattactactaatttcatgaagtgtgcacattaaattcatgctattagtatgtgggagacggttcgtcgacctttagcataacaatcaggttagatttgtggaacctgcaccttcaatctcacgacagtaagattaaaggcacatttccacaaaatgatttatggtaagga

SEQ ID NO: 16494 - RNA, 178 nt, Marinococcus halotolerans
  source 1..178: mol_type = other RNA; note = Related to NZ_ATVM01000016.1
ccctcagtcattatgattggtatcggataagcgtgcacattctttaagatatcgaatcatgggggacggttcgtctaccctttgtttaaagttactattgattttcacatttatgcgttatactttcactatcgtaaaaattaacgcataattgccaaaaagttttttagggtgaggg

SEQ ID NO: 16495 - RNA, 181 nt, Lederbergia wuyishanensis
  source 1..181: mol_type = other RNA; note = Related to NZ_JALIRM010000001.1
cccttagattttattgcaagttttatagagggtgcactactcaaactctataagacacggtaatgggagacggttcgtcatcctatggttaaatgacattcattattcttgatattatgtgttaaatctcacgataagtgaaattcaccccataatttcaataaattacttttggtaaggg

SEQ ID NO: 16496 - RNA, 157 nt, unidentified
  source 1..157: mol_type = other RNA; note = Related to JAFVTV010000006.1; note = Clostridia bacterium
ttcttagatcgttgcaggtgtggctacatatctgtctacgggggatggttcgtctccctgagttttttaacaaagtcagagttgctccaaatcaaggagaaactccacgacagtgaacttcctccttgatttggaggcaaagaaatagtggtaagaa

SEQ ID NO: 16497 - RNA, 159 nt, Ruminococcus flavefaciens
  source 1..159: mol_type = other RNA; note = Related to FRCT01000015.1
ttcttagcctgttgaagaaagagtttctccgacttcctacggaagatggttcgtcttcctaagtttcaaacattatcatagttacacaaaagcaatgtaaaactccacgactgtgaactttaacattgctttcgcgataaaacattttttgtgtaagaa

SEQ ID NO: 16498 - RNA, 168 nt, Anaerovorax odorimutans
  source 1..168: mol_type = other RNA; note = Related to NZ_AUFC01000039.1
ttcttagaacgttataggaacatactagttggtagtacatacctatttacgggaaatgattcgtttccctaagctacttagcaaatgcggaattgctccaaaatcatgagcaattccacgacagtgaaattgctcccaattttggagacaaaacactaatggtaagaa

SEQ ID NO: 16499 - RNA, 151 nt, unidentified
  source 1..151: mol_type = other RNA; note = Related to JAJEQN010000018.1; note = Lachnospiraceae bacterium CLA-AA-H224
ttcttagaacgttgcaggtacatatctgtttacggaagatggttcgtcttcctaagaaaattaacaaacacagagttactccaatcaatggagtaaccccacgacagtggatttcctccattgattggaggtaaaggatttaaggtaagga

SEQ ID NO: 16500 - RNA, 152 nt, Blautia luti
  source 1..152: mol_type = other RNA; note = Related to NZ_JADPGV010000001.1
ttcttagaacgttacagatacatatctgtttacggaagatggttcgtcttcctaagaaaattaacaaacacagagttactccaatcaatggagaaactccacgacagtgaacttcctccattgattggagacaaagagatttaaggtaagga

SEQ ID NO: 16501 - RNA, 152 nt, unidentified
  source 1..152: mol_type = other RNA; note = Related to RAYQ01000024.1; note = bacterium 0.1xD8-82
atcttagagtgttacagatacatatctgtttacgggagatggttcgtcttcctaagagaattaacatatacagagttactccaatcaatggagtaactccacgacagtgaagtttctccattgattggaggtaataattattaaggtaagaa

SEQ ID NO: 16502 - RNA, 159 nt, Lachnospira sp.
  source 1..159: mol_type = other RNA; note = Related to JACOPD010000001.1
atcttagaacgttactgatacatatttttgttgaagtttatggaggatggttcgtcttccggagaatatgaacatgaccagagttggtcaaaaccatggtgtaattccacgacagtgaaatcccaccatggttttgacgcaaaatatataaggtaagaa

SEQ ID NO: 16503 - RNA, 160 nt, Agathobacter sp.
  source 1..160: mol_type = other RNA; note = Related to JAFQRZ010000003.1
atcttagaacgttacagatacatacttatgtagaagtttatgggagatggttcgtcttccggagcaaattaacatgaccagagttggtcaaaaccatggtgtccttccacgacagtgaaaccccaccatggttttgacgcaaaaatatttatggtaagaa

SEQ ID NO: 16504 - RNA, 159 nt, Veillonella sp.
  source 1..159: mol_type = other RNA; note = Related to JADJOK010000004.1
atcttagaacgttgcagatacatatttatgtagaagtctatgggagatggttcgtcttcctgagtaaattaagataaccagagttggtcaaaaccatggtgctattccacgacagtgaaatacccccatggttttgacacaaaatatttaaggtaagaa

SEQ ID NO: 16505 - RNA, 161 nt, unidentified
  source 1..161: mol_type = other RNA; note = Related to JAFUIR010000009.1; note = Lachnospiraceae bacterium
ttcttagaacgttatggatacatatttttatgttgaagtctacggaagatggttcgtcttcctaagtaatgaaattaaaccagagtttgccacaacaatgtggctattccacaatggtgaaatacccccattgttgtggcataaaatattgaaggtaagga

SEQ ID NO: 16506 - RNA, 146 nt, Butyrivibrio hungatei
  source 1..146: mol_type = other RNA; note = Related to FRDH01000006.1
atcttagatgcgttgcagcaagtgttgtgtacggaagatgattcgtcttcccaagaaaatcatttggtttagttgaataaaactagtctttatgcgcatagccatgcacataaagattgttttatccaaaatatatttggtaagaa

SEQ ID NO: 16507 - RNA, 178 nt, Eisenbergiella sp.
  source 1..178: mol_type = other RNA; note = Related to QUES01000001.1
ctcttggaaacgttggttaggtattggatgtgctttggtacatatcaacctttctttaagggaaatggttcgtttcctttagattattaacttagagggtataccgcgacaagatgcgctgataagcagattactgtttatcatcacctcttgtcgtgctaaatatttttggcaaggg

SEQ ID NO: 16508 - RNA, 154 nt, Blautia coccoides
  source 1..154: mol_type = other RNA; note = Related to NZ_UFVT01000001.1
ttcttagaattgttgttaatatgcatacatagcaactaggggtcgctacgacctcgtgagaataataattacatgaactcagctaaaacaacggtgaacttccacaatagtgaaactcccccgttgttttacccgaaagtacattgagtaagat

SEQ ID NO: 16509 - RNA, 154 nt, Ruminococcus sp.
  source 1..154: mol_type = other RNA; note = Related to JACOPE010000001.1
ttcttagaattgttgttaatatgcatacatagcaactaggggttgtttcgacctcgtgagaataataattacatgaactcagctaaaacaacggtgaacttccacaatagtggaactcccccgttgttttacccgaaaatatattgagtaagaa

SEQ ID NO: 16510 - RNA, 154 nt, Mediterraneibacter faecis; identical to SEQ ID NO: 16509
  source 1..154: mol_type = other RNA; note = Related to JAJBQL010000016.1

SEQ ID NO: 16511 - RNA, 155 nt, Eisenbergiella tayi
  source 1..155: mol_type = other RNA; note = Related to MCGH01000001.1
ttcttagaattgttgttaatatgcattatataacaactaggggttgtttcgacctcaaaagaattataatcacatgtacttagctaaatcaacggtgaacttccacgacagtgaaactcccccgttgatttacccaaaatcatattgagtaaggg

SEQ ID NO: 16512 - RNA, 155 nt, Roseburia sp.
  source 1..155: mol_type = other RNA; note = Related to FMFO01000004.1
ttcttagaattgttgttaatatgcattacataacaactaggggttggttcgacctcggaagaataataaacacatgaaattagctaaatcaacggtgaacttccacgacagtgaaactcccccgttgatttacccaaaaacatattgagtaagaa

SEQ ID NO: 16513 - RNA, 148 nt, unidentified
  source 1..148: mol_type = other RNA; note = Related to QXXC01000007.1; note = Clostridiaceae bacterium
cgcttagaattgttaatgtgtgctacatattgactgggagcagttcctgcttcgtttgaagaatcatgacccgtatccatcgtagtttcatgagcgaaaaatggttgtttcgatcatgaaactacgccggaaatatactgagtaagcg

SEQ ID NO: 16514 - RNA, 147 nt, Enterococcus alcedinis
  source 1..147: mol_type = other RNA; note = Related to BMDT01000015.1
ttgttagatatctcccaattgggtatactagcgatgtttcgtcgctgtcagtggaatacacgcaattcgaatgttaaagtctttcccccaactcactacaaagtagtaactcgtggaaaagactttaaaagctatttttggtaatga

SEQ ID NO: 16515 - RNA, 126 nt, Salegentibacter maritimus
  source 1..126: mol_type = other RNA; note = Related to JAEHOK010000008.1
cttttagaattagagtagccgttaatagtgcgatgattcgtcccactggttttaacttacatttatacaatgaattaagtgtcaaaaacgtcagagttttcaacccttaattgatttaagtaaaag

SEQ ID NO: 16516 - RNA, 127 nt, Jiulongibacter sediminis
  source 1..127: mol_type = other RNA; note = Related to NZ_LGTQ01000015.1
cttttagcattaaagtagccattaatagaatgacgtttcgtctttctggtctcaacttacatttatacaataaacttagattttgaaaacgttagagttttcaaaactaactttatctaagtaaaag

SEQ ID NO: 16517 - RNA, 146 nt, Sphingobium yanoikuyae
  source 1..146: mol_type = other RNA; note = Related to NZ_CP047218.1
accttaaactctgggtgagcaatcacctgcgggattagcttcggttaatcctcccacttgtcggcagggtgacggccccccccggggggaccgcccggcatccccgataaggcgcgtcccggtggacgggacgcgaagagttaggg

SEQ ID NO: 16518 - RNA, 130 nt, unidentified
  source 1..130: mol_type = other RNA; note = Related to SDYH01000014.1; note = Alphaproteobacteria bacterium
accttaacctctgggtgagtaatcacctgcgggattggctttcgttaatcctcttacttgtcggcagggtgacggtccccggcatccccgataaggcgcgtcccggtggacgggacgcgaagagttaggg

SEQ ID NO: 16519 - RNA, 144 nt, Stakelama sediminis
  source 1..144: mol_type = other RNA; note = Related to NZ_JACIJI010000005.1
cacttaacctctgggtgagaaatcgcctgcgggatcaccttcggggggtcctcacacttgtcggcaggaagaggggacccgcaccgggaccaccaccgccaccgataaggcgcgtccgtgtggaccggacgcgaagggttgggg

SEQ ID NO: 16520 - RNA, 146 nt, Sphingomonas sp.
  source 1..146: mol_type = other RNA; note = Related to JACYUG010000012.1
cacttaacctctgggtgagcaatcacctgcgggacctgctccggccggtcctcctacttgtcggctcgtgtggaggcaccccgcccggggaccgccgtcgccaccgataaggcgcgcccgtgtggagcgggcgcgaagggttaggg

SEQ ID NO: 16521 - RNA, 139 nt, Sphingomonas sp.
  source 1..139: mol_type = other RNA; note = Related to NZ_CP050137.1
ccactgaactctgggtgagtaatcacctgcggggtctgcttcggctgatcctcacacttgtcaggagcttgagggccccccgcgaggggaccgccgacggcaccgataaggcgcgtccgtgtggaccggacgcgaaggg

SEQ ID NO: 16522 - RNA, 146 nt, Sphingopyxis sp.
  source 1..146: mol_type = other RNA; note = Related to FNWK01000001.1
accttaaactctggatgagcaatcatccgcgggatcggtttcggcagatcctcccacttatcggcaaagtgagggcaccgcacgcgcgggaccaccgccaccaccgataaggcgcgttcgggtggaccggacgcgaagggttaggg

SEQ ID NO: 16523 - RNA, 130 nt, Acetobacter thailandicus
  source 1..130: mol_type = other RNA; note = Related to JAERLA010000016.1
accttaaactcggggtgagtaatcacctgtggaaccaacttcggtaggttctctcattagtcggccgcatggagagcaccacgatcgtcgataaggcgcgtcctggtggagcggacgcgaagagttaggg

SEQ ID NO: 16524 - RNA, 141 nt, Parasphingopyxis lamellibrachiae
  source 1..141: mol_type = other RNA; note = Related to QRDP01000004.1
ccgctcaacctcggggggagaaatcccctgtgggatcctcgtgatcctcatacttatcggcagaagtaggggctcccttctcgggaacgtcccgcgacaccgataagggcgcccggtgcggccgggcgcgaaggttctggg

SEQ ID NO: 16525 - RNA, 136 nt, Poseidonocella pacifica
  source 1..136: mol_type = other RNA; note = Related to NZ_FOJU01000001.1
gcgccacaggctgaccggttttccggtcgaggaggcttcggcctctacccactttgggggcggcggcgatcgcgagcgacagatgcgatcggcgacgacttccgacttaaggccgcagcgcacgttgcggcacggg

SEQ ID NO: 16526 - RNA, 145 nt, Ideonella sp.
  source 1..145: mol_type = other RNA; note = Related to JAGQDF010000002.1
tcgactgttggggtgctacagcaccctgtggggccgaaaggctctaactactcgcaagcccacgccgcacggtgccggtcctccggtgcgcggtacggttggggccggtgcgagcctgcccgggcgaccccgggcaggcatctgg

SEQ ID NO: 16527 - RNA, 146 nt, Burkholderia gladioli
  source 1..146: mol_type = other RNA; note = Related to NZ_CADEWJ010000013.1
tcgtgtcagtggggtgtaaagcaccctgtgggaccgaaaggtcctgtcttttgctaggccgcgtgccgtggagccgagtatctgaacggaccatggcaacgtagctgatgcgagcatgcccgggacgacaccgggcatgcattggg

SEQ ID NO: 16528 - RNA, 166 nt, Variovorax paradoxus
  source 1..166: mol_type = other RNA; note = Related to NZ_CP091716.1
aagtcaaaaacggagtcatggaaacgtggctcgtggaaatcgaaagatttctgacatctgctgggcacgccgcgcttacttggatctctctttcaagaagagccagccttgtgagcttgtcgtgcctaggcagcacgcttcatacgagtctgaagcgacactggcg

SEQ ID NO: 16529 - RNA, 204 nt, Variovorax paradoxus
  source 1..204: mol_type = other RNA; note = Related to NZ_KB905036.1
ttgtcaaaaacggagcggcggcaacgttgctcgtgggaatcggaagattcctgacttctgcccagcacgcggttcctaatgcaccggcgcccggagatgcttacgacagcaatgccgttcgcataatcgtgttgcttagtacgaggtcctgcgtgtctgtgtagcgcagacggttccagacgagctggaaccgttttaatggcc

SEQ ID NO: 16530 - RNA, 178 nt, Rhodoferax sp.
  source 1..178: mol_type = other RNA; note = Related to JAGPDY010000016.1
tcgtgaaaagtgggatgacggtaacgtcatccgtgggggctgaaaggcttctaacttctgcctggcacgtaacgcgacgcaactttgcaccacgacgacaatgacggcgtgattcggttggtagcaatgcgtggctgagcagcgaaacaggtcctggacgagccaggacctgtttaat

SEQ ID NO: 16531 - RNA, 142 nt, Acidovorax sp.
  source 1..142: mol_type = other RNA; note = Related to NZ_NIAZ01000004.1
tcgttaatcgtggggatgtgggaacgcatctcgcggggccgaaaggctctgatgttctctgcggtcacgcggtcgccggtacgcggtggtccgggtggttgcagcgaagccggtcccggacgagtaccgggaccggttaggg

SEQ ID NO: 16532 - RNA, 133 nt, unidentified
  source 1..133: mol_type = other RNA; note = Related to JAHJNJ010000041.1; note = Gammaproteobacteria bacterium
tcgttaaaagcggggcatgaaagtgctcgtggcagtcgcaaggctgctaatgttcacgcaggcacgcggtcggtcgcatatgacggtgtatgccgtgaagccggtcccgaacgagattcgggaccgtttgaga

SEQ ID NO: 16533 - RNA, 143 nt, Pseudomonas kirkiae
  source 1..143: mol_type = other RNA; note = Related to NZ_QJUP01000005.1
tcgtcaagcgaggggcgcgtaagcgctcgtggcggccgaaaggctgctgatgttcaccgcgggcatggcactggtcgggttggtccggtcgggtcgatcctgcggcgaagccggtcccggacgagttccgggaccggttgaga

SEQ ID NO: 16534 - RNA, 152 nt, Geomonas subterranea
  source 1..152: mol_type = other RNA; note = Related to CP077683.1
ccttagaatactgggggtattgccccccgaggaggattaagtaagccctctgccttttcctgcggccatgcatggcacccggatgtcagtcggatgaccctgagtggttgatgggagagcctcttcgcggcgacgcgaagaggcaaatagta

SEQ ID NO: 16535 - RNA, 117 nt, Aeromonas hydrophila
  source 1..117: mol_type = other RNA; note = Related to NZ_NKXI01000009.1
aagcttaaaataggagcgaaagctctgtggagtgtaagtgctctaacagatccggtgaggcggccacgcgaactgtcgccacggcgcccggatcgccccgctgtgagcggggcaggt

SEQ ID NO: 16536 - RNA, 118 nt, Aeromonas jandaei
  source 1..118: mol_type = other RNA; note = Related to CP043321.1
aagctaaagataggagcgaaagctctgtggagtgcaatgtgctctgactgatccggtgaggcgcccacgcgaactgtcgccacggcgcccggatcgccccgctgtgagcggggcaggt

SEQ ID NO: 16537 - RNA, 118 nt, Vibrio cholerae
  source 1..118: mol_type = other RNA; note = Related to AAXMMD010000082.1
aagcttaaaattaaggtaataccttgcggagtttaaaaaactctaactgatccggtgaggcgactgcgcctattctcgccactggcgcccggatcgccacgctgtgagcgtggcaggt

SEQ ID NO: 16538 - RNA, 116 nt, Pseudoalteromonas piscicida
  source 1..116: mol_type = other RNA; note = Related to NZ_CP074587.1
aagcttaaaattaaggtaataccttgcggagtgtaaactctaactgatccggtgaggcggctgcgcctattctcgcctctgggcgcccggatcgccacgctgtgagcgtggcaggt

SEQ ID NO: 16539 - RNA, 139 nt, unidentified
  source 1..139: mol_type = other RNA; note = Related to VXNK01000080.1; note = Rhodospirillaceae bacterium
tcgtctgaaactggggccgaatggccctgcgggagcgtgtctcccaccactgtctcggcacacgccatcccggtcacccggtcacgcgcgccgagtggagccgccaagcacgaggcagccttggcggctagggtacggg

SEQ ID NO: 16540 - RNA, 135 nt, Pseudomonas syringae
  source 1..135: mol_type = other RNA; note = Related to JAKMVT010000021.1
tcgcagatgtgggggcttcggccctgtggaggttcgcctctaacccttccccacgcgcgccgaggcctcagcaccactggccaccgggccgcgaagggatactgcttccgcgcgagacggaagcaggtgctcaga

SEQ ID NO: 16541 - RNA, 135 nt, Pseudomonas sp.
  source 1..135: mol_type = other RNA; note = Related to NZ_CP056030.1
tcgcagctgtgggggcttcggccctgtggaggttcgcctctaacccttccccacgcgcgccgaggcctcagcaccactggccaccgggccgcgaagggatactgcttccgcgcgagacggaagcaggtgctcaga

SEQ ID NO: 16542 - RNA, 141 nt, Pseudomonas marginalis
  source 1..141: mol_type = other RNA; note = Related to FNSP01000003.1
tcgcagatgtgggggcctcggccctgtggaggttcgcctctaacccttccccacgcgctccggagcctcagcaccactggccactggccacgggccgcgaagggatactgcttccgcgcgagacggaagcaggtgctcaga

SEQ ID NO: 16543 - RNA, 135 nt, Pseudomonas sp.
  source 1..135: mol_type = other RNA; note = Related to JAEKFB010000009.1
tcgtagatgtgggggcttcggccctgtggaggttgaacctctgacccttccccacgcgctccgaagcctcagcgtcacaggtctcgggtcgcgaagggatactgcttccgcgcgagccggaagcaggtgctcaga

SEQ ID NO: 16544 - RNA, 134 nt, Pseudomonas viridiflava
  source 1..134: mol_type = other RNA; note = Related to NZ_UWFM01000116.1
tcgtagatgtgggggcttcggccctgtggaggtttacctctaacccttccccacgcgctccggagcctcagcatcacaggtctcgggtcgcaacgggatactgcttccgcgcgagccggaagcaggtgctcaga

SEQ ID NO: 16545 - RNA, 134 nt, Pseudomonas lundensis
  source 1..134: mol_type = other RNA; note = Related to JAAQYG010000033.1
tcgctgttgttggggccttggccccgtggaggcttgcctctaaccccttccccacgcgattcggcacccggcagtacgcggatccggatatgcagggatactgcttccgtgcgagtcggaagcaggtgctcaga

SEQ ID NO: 16546 - RNA, 134 nt, Pseudomonas pisciculturae
  source 1..134: mol_type = other RNA; note = Related to NZ_JACVZE010000010.1
tcgctgttgtgagggcttcggtccagtggaggcttgcctctaaaccctttcccaagcgcttcggcacccggcagcacagggatccggagacgtggggatactgcttccgtgcgagtcggaagcaggtgctcaga

SEQ ID NO: 16547 - RNA, 139 nt, Pseudomonas protegens
  source 1..139: mol_type = other RNA; note = Related to NZ_LUUE01000002.1
tcgcttgttgtgagggcttcggcctagtggaggcttgcctctaatccttccccacgcagttcgcccgcccgtccgtgatgccgggagcgcgatatgccgggatactgattccgtgcgagacggaatcaggtgattcaga

SEQ ID NO: 16548 - RNA, 115 nt, Burkholderia pseudomallei
  source 1..115: mol_type = other RNA; note = Related to CP008911.1
tctcgtgttgttggggcgcgagccctgtggggaggaaactctctaacgtttgcccgttcaagtccttctggacgcgtcgggataggcgggttccgcgagaacggaacccggtgag

SEQ ID NO: 16549 - RNA, 119 nt, Burkholderia ubonensis
  source 1..119: mol_type = other RNA; note = Related to NZ_LOVC01000028.1
tcgtgttggttggggcgatagccccgtggaggggaaactctctaacgtatgcctcgccttgaagtctgtgaaacggtggggatgggggttccggcgagaccggaacccgttgaaatagg

SEQ ID NO: 16550 - RNA, 132 nt, Pusillimonas sp.
  source 1..132: mol_type = other RNA; note = Related to NQMK01000010.1
tcgcggttgtgagggcttcggccctgtggagacttaggtctctgtccattcccgcgtctgtcggctgtcgacgacactgcacgggccaggggatagccgttttcggcgagaggccgaaaacgggtgatttgg

SEQ ID NO: 16551 - RNA, 151 nt, Achromobacter marplatensis
  source 1..151: mol_type = other RNA; note = Related to CADIJU010000003.1
tcgcggttgtgggggtttcggccccgtggaggcttcggcttctgcccattcccgcgtctggcagctggcggtgctccgtcatggatgacgacatgctgcagaggcgaggggataagccgttttcggcgagaaccgaaaacgggtgattagg

SEQ ID NO: 16552 - RNA, 147 nt, Achromobacter mucicolens
  source 1..147: mol_type = other RNA; note = Related to CADIKQ010000001.1
tcgtggttgtaggggctccagccccgtggagactttggtctctgctcattcccgtctcgatctgctccagcgccgctccttcacggacgacgactggggcatggggggatagccgttttcggcgagagccgaaaacgggtgatttgg

SEQ ID NO: 16553 - RNA, 162 nt, Alcaligenes faecalis
  source 1..162: mol_type = other RNA; note = Related to MSZO01000007.1
tcgcagtagtgggggcttcggccccgcggagattcgtctctaccctttctcttgccaggcttcggtctgcgccctgctgcagtgatgtagtcagtgacgcgtgacacgcagttctccaggggataagccgttctcaacgagatgtgagaacggatgatatgg

SEQ ID NO: 16554 - RNA, 145 nt, Janthinobacterium sp.
  source 1..145: mol_type = other RNA; note = Related to CP062062.1
ttgctgttttgagagcttcggctctgtggaggcttgcctctaacacttccataacctcgaaccgcggtctttcaacacgaacgactacgacacgggactggggggaaagtctgcttctggcgagagccagaagcagttgataggt

SEQ ID NO: 16555 - RNA, 151 nt, Polaromonas sp.
  source 1..151: mol_type = other RNA; note = Related to RDZZ01000077.1
tcgcgatttggggacttagcaataagttctgtggaagcgaaagcttctaacctctccccagcagcaggttggcggcacggcttcacggtcgatgttcttcatgcagtgcggggatagtccggtttggcgagaaccaaaccggtgttttagg

SEQ ID NO: 16556 - RNA, 115 nt, Xenophilus azovorans
  source 1..115: mol_type = other RNA; note = Related to NZ_JQKD01000066.1
tcgcgattggtggagtgaaagctccgtggaggcgcaagcttctaatccgtcccatgcgtgtctttccggttgcaggggataggcgcgtcggcgagagcccgacgcgttaatcgag

SEQ ID NO: 16557 - RNA, 147 nt, Achromobacter dolens
  source 1..147: mol_type = other RNA; note = Related to CADIJW010000048.1
tcgtagcatcgggggcttcggtcccgcgggggtgtcaaagcccctacccaatcccagaccagacggacggacgcggcctcaccgccacgactctccggcaggcaggggatagccgagtccggacgagaaccggactcgggtaactgg

SEQ ID NO: 16558 - RNA, 144 nt, unidentified
  source 1..144: mol_type = other RNA; note = Related to JAECRL010000003.1; note = Burkholderiales bacterium
tcgtagcaatggaggcttaggcctcgtgggggcgaaagctcctatccaatcccagaccagacgggtgggcacgggctctcgggcacgtctctccggcaggcaggggataaccgagtccgacgagagccggactcgggtaacagg

SEQ ID NO: 16559 - RNA, 122 nt, Azohydromonas caseinilytica
  source 1..122: mol_type = other RNA; note = Related to NZ_JABBFW010000053.1
tcgcagtagttggagcttcgtctccgcggaggttgatagcctctaccacttctcctaaggtccggcccggcccggcccacggggatagtcggatccgacgagaggcggatccgtgtaaagag

SEQ ID NO: 16560 - RNA, 144 nt, Pseudomonas syringae
  source 1..144: mol_type = other RNA; note = Related to NZ_MLEM01000008.1
tcgattgcttgtaggtgctacagcactgcggaggttgattttttggacctctaacttttggaccgggcgtgtgcggtcgtcaccgtatgcgtatgtagtgcggtcttgtaggcttcgtcgagacgtcgaagcctggtgatttca

SEQ ID NO: 16561 - RNA, 142 nt, Pseudomonas fluorescens
  source 1..142: mol_type = other RNA; note = Related to JAEKIK010000020.1
tcgattgcttgtaggtgctacggcactgcgggggttgattttggacctctaacttttgggccgggcgtgtgcggtcgtcaccgtgcgcgtatgtggtgcggtcttgtaggcttcgtcgagacgtcgaagcctggtgatttca

SEQ ID NO: 16562 - RNA, 142 nt, Pseudomonas veronii
  source 1..142: mol_type = other RNA; note = Related to NZ_CP018420.1
tcgattgtttgtaggtgctaaggcactgtgggggttgattttgaacctctaaattttgggccgggcgtgtgcggtcgctaccgtgcgcgtatgtggtgcggtcttgtaggcttcgtcgagacgtcgaagcctggtgatttca

SEQ ID NO: 16563 - RNA, 140 nt, Pseudomonas aeruginosa
  source 1..140: mol_type = other RNA; note = Related to CP004061.1
tcgattgctgttggtgctccggcaccgtggaggcttcggtctctaaattttggcaccgacgcgcccatcgcagtccatcgcgggtcacggccgtccagcctagtcggcatcgtcgagagcgacgatgcctggtggtttca

SEQ ID NO: 16564 - RNA, 132 nt, Pseudomonas aeruginosa
  source 1..132: mol_type = other RNA; note = Related to LN831024.1
tcgattgctgttggtgcttcgacaccgtggaggccttgagtctctaatttttggccccgacgtggcgcgtggtatcgcgtgtgtcatcggatcggcctagtcaggcttcgtcgagagcacgaagccaggtgg

SEQ ID NO: 16565 - RNA, 140 nt, Pseudomonas fluorescens
  source 1..140: mol_type = other RNA; note = Related to CP031450.1
tcgattgttgttggtgcatagcaccgtggaggctttagcctctaacccttgggcggcacactcggcgtacgtcgtgatctacgcgtatcaccggtgcgtaccgacctagtcaggcttcgtcgagactcgaagccaggtga

SEQ ID NO: 16566 - RNA, 147 nt, Pseudomonas aeruginosa
  source 1..147: mol_type = other RNA; note = Related to JAIZEG010000001.1
tcgattgttgttagcgtgaaaacgctgtggggatttcggtccctgacccttgggcccggcgtgcggcgaggcgtagcgatctgcgcatccatccggcgtcacggcatagtcaggcgtcgtcgagaaacacgacgcctggcgatttca

SEQ ID NO: 16567 - RNA, 142 nt, unidentified
  source 1..142: mol_type = other RNA; note = Related to NZ_BDMN01000231.1
tcgaagcaattagagtctttagctctgcggaggcaatgcctctaaaccatttttcgtgcaacattcaggtcgatacccttgtggtaatccatcactagcatgagatagccgctttcggcgagaccgaaagcgggtaattcag

SEQ ID NO: 16568 - RNA, 141 nt, unidentified
  source 1..141: mol_type = other RNA; note = Related to NZ_BLYC01000085.1
tcgaggctattagagcattagctctgtggagacactgtctctgaccatttttcgtgcaacattcaggtcgatacccttgaatgtcatccatcaccagcatgagatagccgctttcggcgagaccgaaagcgggtgattcag

SEQ ID NO: 16569 - RNA, 143 nt, Pseudomonas sp.
  source 1..143: mol_type = other RNA; note = Related to JAJHPU010000021.1
tcgttgctgttagtgcattgcactgtggagacccctggtctctgtcccttggtcgcacagagggccgcgtgcgtcgcgttatgcatgtacgccacctcgcgacataagcggcttcgtcgagagacgaagccggtgtcttcgga

SEQ ID NO: 16570 - RNA, 124 nt, Paraburkholderia sp.
  source 1..124: mol_type = other RNA; note = Related to SCRP01000034.1
tcgttgctgttgaggcttcgcctcgtggaggggtaactctctaacacgtcccttcgcttcgcctctggcgaacgatatgaggggatagctgcttccggcgagagccggaagcaggtgactagga

SEQ ID NO: 16571 - RNA, 135 nt, Pseudomonas syringae
  source 1..135: mol_type = other RNA; note = Related to JACYWI010000012.1
ttgatagtgtttggcagcacttgtggctgtcgtggaggatttataccctctgttccccgtgcctgcgcggatcggtgccctcgggctaccacgttcccgtcagggctgtgcgtcgtcgagagcgacgcacagtgg

SEQ ID NO: 16572 - RNA, 135 nt, Pseudomonas putida
  source 1..135: mol_type = other RNA; note = Related to CP045551.1
tcgattgtgtttggcagctcttgtggctgtcgtggaggagttaaatcctctgtcccccgtgcctgcgcggatcggtaccctcgggttaccaagttcccgtcagggctgtgcgtcgtcgagagcgacgcacagtgg

SEQ ID NO: 16573 - RNA, 141 nt, Pseudomonas helleri
  source 1..141: mol_type = other RNA; note = Related to WIVT01000008.1
ttgagtgtatttggtggacgtgagtctatcgtggaggtatcaacctctaaccccatgcctgcacgcatccggtccctcgtgggtatcccgggtggctgccagggctgtgcgtcgttgagacgcgacgcacagtggctctta

SEQ ID NO: 16574 - RNA, 120 nt, Agrobacterium vitis
  source 1..120: mol_type = other RNA; note = Related to JACXXJ020000005.1
ccgtctatgtgtggggccggaggccctgtggggatgtaaatccccgattcaatcctgcgtctggctagggaccgcggcacgcgcgccgcacccggcgggctcgggtgcggcatgttcgag

SEQ ID NO: 16575 - RNA, 118 nt, Agrobacterium vitis
  source 1..118: mol_type = other RNA; note = Related to CP081837.1
ccgtcaatgtgtggggccggaggccctgtggggatgcaagtccccgattcaatcccgtgtctggcagggaccgtggccgcgcgccgcacccgtcgggcccgggtgcggcatgttcgag

SEQ ID NO: 16576 - RNA, 119 nt, Agrobacterium rhizogenes
  source 1..119: mol_type = other RNA; note = Related to JAAMDS010000038.1
ccgtcaatatgtggggccggaggccctgtggggatgaaaatccccgactcaatcccgtcgtctgctggggaccgtggccgcgcgccgcacccgtcgggcccgggtgcggcatgttcgag

SEQ ID NO: 16577 - RNA, 117 nt, Brucella thiophenivorans
  source 1..117: mol_type = other RNA; note = Related to NZ_NNRJ01000027.1
ccgtctatatgtggggccggaggccctgtggggattagtccccgtctcaatcctgcgtctgccgggacccgtggcctcgcgccgcacccgtcgggcaccaggtgcggcatattcgag

SEQ ID NO: 16578 - RNA, 122 nt, Rhizobium pusense
  source 1..122: mol_type = other RNA; note = Related to NZ_PVWU01000025.1
ccgtcgatgtgtggggccggaggccgtgtggagacctggtaggtctccgactcaatcccgtcgtctggcaggggccgtggccgcgcgccgcaccctccgggctcgggtgcggcatattcgag

SEQ ID NO: 16579 - RNA, 121 nt, Rhizobium leguminosarum
  source 1..121: mol_type = other RNA; note = Related to JACDJD010000002.1
ccgtcgatgtgtggggccgatggccctgtgggggtgtttacatccccgattcaatcccgtctctggcagggaccgtggcccgcgcgccgcaccctccgggctcgggtgcggcatattcgag

SEQ ID NO: 16580 - RNA, 119 nt, Paracoccus sediminis
  source 1..119: mol_type = other RNA; note = Related to FZNM01000001.1
ccgtcttgagttggggccgtgagccctgtggaggccgatggtctccgtctcaatcccgtagctggcagggaccgcggacgagcgccgcacccgctgggcacgggtgcggcatgttcgag

SEQ ID NO: 16581 - RNA, 120 nt, Sulfitobacter guttiformis
  source 1..120: mol_type = other RNA; note = Related to JASG01000004.1
ccgtctggagttggggccatgagccctgtggagaccaatggtctccgtctcaatcccgttcgtcggcagggaccgcggcagcgcgccgcacccgctgggctcgggtgcggcatgttcgag

SEQ ID NO: 16582 - RNA, 120 nt, Pseudooceanicola onchidii
  source 1..120: mol_type = other RNA; note = Related to NZ_SPUW01000001.1
ccgtcttgagttggggccttgagccctgtggagaccgatggtctccgattcaatcccgtttaccggcagggaccgcagccgcgcgccgcacccgctgggcacgggtgcggcatgttcgag

SEQ ID NO: 16583 - RNA, 120 nt, Cereibacter sphaeroides
  source 1..120: mol_type = other RNA; note = Related to NZ_QRBG01000022.1
ccgtcttgagttggggccgtgagccctgtggaggcgtcaagcctccgttccactcccgagccggcagggaccgcggccacggcgccgcacccgcccgggtccgggtgcggcatgttcgag

SEQ ID NO: 16584 - RNA, 116 nt, Agrobacterium tumefaciens
  source 1..116: mol_type = other RNA; note = Related to NZ_APLP01000010.1
gtccaatgtgttggggcttcggccctgtggaggcctcaaaacctccgtctcactcccaggtctggcggggggcgcgcgcgtccgcacccgtcgggcccgggtgcggcatattcgag

SEQ ID NO: 16585 - RNA, 118 nt, Agrobacterium vitis
  source 1..118: mol_type = other RNA; note = Related to NZ_AP023278.1
ccgtccgatgtgtggggccgtaggccctgtggaggccttaaacctccgtctcactcccgtgtctggctggggggcgcgcgcgtccgcacccgtcgggcccgggtgcggcatattcgag

SEQ ID NO: 16586 - RNA, 120 nt, Agrobacterium sp.
  source 1..120: mol_type = other RNA; note = Related to CP033022.1
ccatcaatatgtggggccacagagccctgtgggggcgcaagcctccaattcacttccgatggctggaaggggacggcagcgcgccgcacccggtagggcttcgggtgcggcatatcgagg

SEQ ID NO: 16587 - RNA, 119 nt, Neorhizobium galegae
  source 1..119: mol_type = other RNA; note = Related to CCRK01000005.1
ccatcaatatgtggggccttagagccctgtggaggtgcaaacctccaattcacttccgacggctggaaggggacggcacgcgccgcacccggtagggcttcgggtgcggcatatcgagg

SEQ ID NO: 16588 - RNA, 120 nt, Aureimonas sp.
  source 1..120: mol_type = other RNA; note = Related to NZ_AP025032.1
ccgtctaaatgtggggcctggagccctgtgggaacgcagtgttcccgtttcaatcccgtgtctggcagggaccgtggccgcgcgccgcacccgtcgggctccgggtgcggcatattcgag

SEQ ID NO: 16589 - RNA, 119 nt, Pelagibacterium sp.
  source 1..119: mol_type = other RNA; note = Related to MEEU01000016.1
ccgtcgaagtgtggggcctggtgccctgtgggagcctagtgttcccgtctcaatcccgtgtctggcagggaccgtggcgcgcgccgcacccgtcgggctccgggtgcggcatattcgag

SEQ ID NO: 16590 - RNA, 121 nt, Methylobacterium mesophilicum
  source 1..121: mol_type = other RNA; note = Related to JADCRT010000002.1
ccgtcgatgtgttggggccggaggccctgtggggatcttcggattcccgattcaatcccgtctctggctgggaccgcggcacgtgccgcacccgccgggcaacgggtgcggcatgttcgag

SEQ ID NO: 16591 - RNA, 122 nt, Bosea sp.
  source 1..122: mol_type = other RNA; note = Related to VFMG01000001.1
ccgtcgaagtgttggggcctggagccctgtgggagctttatgctcccgtctcagatccggcgtctggatgggaccgtggccgcgcgccgcacccgccgggcttcgggtgcggcatattcgag

SEQ ID NO: 16592 - RNA, 118 nt, Paracoccus sp.
  source 1..118: mol_type = other RNA; note = Related to JACEMU010000004.1
ccgacaaaggctggggccggaggccctgtgaaggcttagcgccttcgactcgttcctgcgtctctggctggaccgtggcagcgcgccgcgcccgcccggggccgggcgcggcatgtaa

SEQ ID NO: 16593 - RNA, 116 nt, Ruegeria atlantica
  source 1..116: mol_type = other RNA; note = Related to NZ_WQCG01000003.1
ccgacaaaggctggggccagaggccctgtgaaggcttagagccttcgtctagttcctgtgtctctggatggaccgtggcagcgcgccgcgcccgcccgggaccgggcgcggcatgg

SEQ ID NO: 16594 - RNA, 118 nt, Roseobacter litoralis
  source 1..118: mol_type = other RNA; note = Related to CP002623.1
ccgacgagaactggggccagaggccctgtgaaggcttagagccttcgtctctcacctgcgtctcggcacgggggatggccgcgcgccgcaccccaccggggttgggtgcggcatgtaa

SEQ ID NO: 16595 - RNA, 118 nt, Roseovarius sp.
  source 1..118: mol_type = other RNA; note = Related to NZ_CP045393.1
ccgacgagaactggggccagaggccctgtgaaggcttagcgccttcgactctcacctgcgtctcgggatgcggggtggccgccggccgcacccatccgggattgggtgcggcatgtaa

SEQ ID NO: 16596 - RNA, 117 nt, Exiguobacterium profundum
  source 1..117: mol_type = other RNA; note = Related to CP059262.1
ccgacgcgaactggggccagtggccctgcgaggccaagagccttcgactcacacctgcgtctcggggtgggggctggccgcgcgccgcacccatccggggttgggtgcggcatgtaa

SEQ ID NO: 16597 - RNA, 120 nt, Sphingobium sp.
  source 1..120: mol_type = other RNA; note = Related to JACESO010000004.1
ccgtcgaagtgtggggcctggagccctgaggaggcatattgcttccgatatcaatctcgtggctggtcgggaccgtggcgtgcgccgcacccgtcgggctccgggtgcggcatgttcgag

SEQ ID NO: 16598 - RNA, 119 nt, Devosia sp.
  source 1..119: mol_type = other RNA; note = Related to FOFL01000001.1
ccgtctaagtgtggggcctagagccctgtggaagcttcggcttccgtcaacctcgtcgtctctcagggccgtggcgcgcgcgccgcacccgtccgggcgccgggtgcggcatattcgag

SEQ ID NO: 16599 - RNA, 122 nt, Devosia enhydra
  source 1..122: mol_type = other RNA; note = Related to NZ_FPKU01000001.1
ccgtctatcgttggggcctctggccctgtggaggcgtgaaagcctccaattcaatcccgacgaccggtagggagcgaggccgcgcgccgcacccgcccgggatcgggtgcggcaaattcgag

SEQ ID NO: 16600 - RNA, 116 nt, unidentified
  source 1..116: mol_type = other RNA; note = Related to WRPF01000034.1; note = Caulobacteraceae bacterium
acgcatactggggccttgagccctgtgagaagcttagcttctcgaccaccgtccgcgtgtgcagggatgtcggtgcctcggtgccgcgccctcaggccgggcgcggcctattaggg

SEQ ID NO: 16601 - RNA, 119 nt, Methylobacterium sp.
  source 1..119: mol_type = other RNA; note = Related to NZ_LMNU01000047.1
tcgtcaccagctggggcttcgagccctgtgagaggttaatcctctcgtctacctccttcggcctcagcgggggcggcgccgtgccgcgcccgcccggggccgggcgcggcaatcccgag

SEQ ID NO: 16602 - RNA, 119 nt, Rhizorhabdus wittichii
  source 1..119: mol_type = other RNA; note = Related to CP021181.1
ccgtcagcagcaggggccacaagccctgtgggaagattgtcttcccgactaccacctgcgtctcggccgggagtggcgctgcgccgcgcccgcccgggaccgggcgcggcaaccccgag

SEQ ID NO: 16603 - RNA, 114 nt, Sphingomonas sanguinis
  source 1..114: mol_type = other RNA; note = Related to NZ_LDTE01000007.1
ccgtcagaagctggggccaaaagccctgtaaggagaaatccttgactacttcctgtgtctcggcgggggagcggcgcgccgcgcccgcccgggaccgggcgcggcgaccccgag

SEQ ID NO: 16604 - RNA, 119 nt, Sphingopyxis sp.
  source 1..119: mol_type = other RNA; note = Related to NZ_AP017898.1
ccgtcagaagctggggcctatggccctgtggggagattgtttccccgactaccacctgcgtctcggccgggggtggcgtcgcgccgcgcccgcccgggaccgggcgcggcaaacccgag

SEQ ID NO: 16605 - RNA, 119 nt, unidentified
  source 1..119: mol_type = other RNA; note = Related to CP011344.1; note = Proposed Citromicrobium sp.
ccgtcagaagctggggcctttggccctgtggggagattttctccccgactaccacctgcgtctcggccgggggtggcgtcgcgccgcgcccgcccgggaccgggcgcggcaaccccgag

SEQ ID NO: 16606 - RNA, 116 nt, Qipengyuania flava
  source 1..116: mol_type = other RNA; note = Related to JAGHQS010000004.1
ccgtcagaagctggggccgctggccctgtggggagattggctccccgactaccacctgcgtctgggcggggtgcggtgcgccgcgcccgcccgggaccgggcgcggcatgcccgag

SEQ ID NO: 16607 - RNA, 119 nt, Sphingobium sp.
  source 1..119: mol_type = other RNA; note = Related to JADOUC010000001.1
ccgtcagaagctggggccacaagccctgtggggagattgcctccccgactaccacctgcgtctcggcggcggggagcggcgcgccgcgcccgcccgggaccgggcgcggcaagcccgag

SEQ ID NO: 16608 - RNA, 116 nt, Sphingopyxis sp.
  source 1..116: mol_type = other RNA; note = Related to NZ_JACBGA010000006.1
ccgtcagaagctggggcgaaaagccctgtggggagattgtcttcccgactaccacctgcgtctcggccgggggcggtgcgccgcgcccgcccgggaccgggcgcggcaagcccgag

SEQ ID NO: 16609 - RNA, 120 nt, Sphingomonas sp.
  source 1..120: mol_type = other RNA; note = Related to LMKH01000010.1
ccgtcagaagcaggggcgatctcaagccctgtgggagaatggttctcccgactaccacctgtgtctcggcgggggggcggcgcgccgcacccgcccgggaccgggcgcggcatgcccgag

SEQ ID NO: 16610 - RNA, 116 nt, Burkholderia vietnamiensis
  source 1..116: mol_type = other RNA; note = Related to JAIZSQ010000047.1
gcgtagtacctgggcctgcagtgtgaggcctgcggagaggcaactctccaatcattgccccgggccatgtgcctcgggcgccccggccgccgcctggtacggcggccggaaacgga

SEQ ID NO: 16611 - RNA, 117 nt, Burkholderia vietnamiensis
  source 1..117: mol_type = other RNA; note = Related to JAGSTU010000036.1
gcgtattgcctgggccgctgcgatgggcctgcggagaggaaactctccaacctttgccccgggacgcgtgtctcgggcgcccccggccgccgcctggtacggcggccggaaaacgga

SEQ ID NO: 16612 - RNA, 107 nt, Burkholderia sp.
  source 1..107: mol_type = other RNA; note = Related to NZ_JAFD01000236.1
gcgtattacctgggcctgctgtcagggcctgcggagaggaaactctccaacctttgcccggtttctgggcgcccggccgccgcctggttgcggcggccggaaacgga

SEQ ID NO: 16613 - RNA, 117 nt, Rubrivivax sp.
  source 1..117: mol_type = other RNA; note = Related to JACZKT010000108.1
gcgtagtacctggacccgctgtttggggtctgcggagaggcaactctccaaccattgccccggtcacgcgtaccggggcgccccggccgccgcctggtgcggcagccgggagacgga

SEQ ID NO: 16614 - RNA, 129 nt, Burkholderia glumae
  source 1..129: mol_type = other RNA; note = Related to CP001505.1
tcgtaatgctggccttagggctgtggaggggaaaccctctgacacatcgcggagcgcatggccgatgcgatcggcacggcgggacgcgatggctgtggtgccgcctggaagcggcaccacagttctagg

SEQ ID NO: 16615 - RNA, 128 nt, Cupriavidus campinensis
  source 1..128: mol_type = other RNA; note = Related to VCIZ01000019.1
cagtttttgacgggcctttgggctgaggaggggaaaccctctaccacctttgcgggcgcaggaccggagacgggacgacgcattgcgaagggacgcgccgccgcctggaacggcggcgcgattcgggg

SEQ ID NO: 16616 - RNA, 118 nt, Rhodovulum viride
  source 1..118: mol_type = other RNA; note = Related to NZ_MUAV01000008.1
tcctcatacccagcttggactcgttcaagcgcggaggggttttcccctctaccacttctaccgcacacggcccggaggcccccgagggggacgagaggacggcggcgggcgaagcaga

SEQ ID NO: 16617 - RNA, 118 nt, unidentified
  source 1..118: mol_type = other RNA; note = Related to CP046620.1; note = Rhodobacteraceae bacterium 9Alg 56
tcctcatacccagcttggacttgttcaagcgcggaggggttctcccctctaccacttctaccgcacacggcccggagtccccggagggggacgaggggacggcggcgggcgaagcaga

SEQ ID NO: 16618 - RNA, 124 nt, Sphingorhabdus wooponensis
  source 1..124: mol_type = other RNA; note = Related to NZ_RWJI01000001.1
ttctcatattcagctttgacgttagtccgagcgtggagagcgaaagctctctgacacttcattcgcacaggccgcgatggccccggcgacggggatgcgcggacgacggcgagcgaagcagaga

SEQ ID NO: 16619 - RNA, 151 nt, Rhizobium herbae
  source 1..151: mol_type = other RNA; note = Related to NZ_JAGGJV010000004.1
tcgtcattttcaggccattctcagaaatgcgaatgccgtggaggaccttcgtgtcctctgatcttacccggacgcccgaggacccgagaggggacggcggcggcgggcgaagcagaagcagtcccgacgagcgggctgcttctaggtagaa

SEQ ID NO: 16620 - RNA, 151 nt, Agrobacterium tumefaciens
  source 1..151: mol_type = other RNA; note = Related to JAGIPO010000002.1
tcgtcattttcaggccattctcagcgatgagaatgccgtggagggccgctgtgtcctctgatcttacccggacgcccgaggacccgagaggggacggcggcggcgggcgaagcagaagcagccccgacgagggggctgcttctagatagaa

SEQ ID NO: 16621 - RNA, 150 nt, Rhizobium sp.
  source 1..150: mol_type = other RNA; note = Related to NZ_LMPE01000005.1
tcgtcattttcaggtattcgcatatgcggataccgtggaggacctcgcgtcctctgatcttacccggacgccgggcgacccgagaggggaggccgtggcgggcgggcgaagcagaagcagccctaacgagcgggctgcttctaggtaaaa

SEQ ID NO: 16622 - RNA, 147 nt, Rhizobium sp.
  source 1..147: mol_type = other RNA; note = Related to JAILYH010000012.1
tcgttattttcaggccattcgcgaaagcgaatgccgtggagggccttcgtgccctctgatcttacccggacgcccgaggagacccgagaggggacgacggcggcgggcgaagcagaagcaaccccgacgagcgggttgcttctaggt

SEQ ID NO: 16623 - RNA, 153 nt, Rhizobium bangladeshense
  source 1..153: mol_type = other RNA; note = Related to JABDWX010000001.1
tcgtcattttcaggccattcgcgcaagcgagtgccgtggaggaccttcgtgtcctctgatcttacccggacgcccgaggaaggacccgagaggggacgacggcggcggtcggagcagaagcaaccccgacgagcgggttgcttctaggtagaa

SEQ ID NO: 16624 - RNA, 150 nt, Rhizobium sp.
  source 1..150: mol_type = other RNA; note = Related to VIUA01000006.1
tcgtcattttcaggccattcgcgtaagcgagtgccgtggagggcctttgtgtcctctgatcttacccggccgcccgaggccccgaggaggggacgacgacggcgggcgaagcagaagcaaccccgacgagcgggttgcttctaggtagaa

SEQ ID NO: 16625 - RNA, 140 nt, unidentified
  source 1..140: mol_type = other RNA; note = Related to NZQL01000081.1; note = Hyphomicrobiales bacterium
tcgttatctgaaggtcgggctctattatcccgaccgtggaggggtgaccctctatcacttcccccaagaggccccggtgggacggggaccgacacgggcgaagcagccgcgatcaacgactgatcgcggctagaatgaag

SEQ ID NO: 16626 - RNA, 145 nt, Siculibacillus lacustris
  source 1..145: mol_type = other RNA; note = Related to NZ_SJFN01000052.1
tcgtttcatccagtaccgccgcaaggcagtacgcggagagggcaacctctctaccgcttatccgccgccaccgggctctcctctgggccgggccgcgacggcgaagcaagatccgccaacgacaggcggatctttggcacttggg

SEQ ID NO: 16627 - RNA, 137 nt, unidentified
  source 1..137: mol_type = other RNA; note = Related to RXIY01000013.1; note = Hyphomicrobiales bacterium
tcgtcatatccagggccgcccatcggcggcccgcggaggaggcaactcctctatcgcttgctggtgtcgagcccggggatgggcgagggccggacggagcaagagccgctacgacgcgcggctctaaggcacttggg

SEQ ID NO: 16628 - RNA, 131 nt, Agrobacterium vitis
  source 1..131: mol_type = other RNA; note = Related to CP055265.1
tcatcacaccttgaactcttcggagttcgcggaggggtagccctctactgcttatccggcccacggccccggacccccggaggacgatggcgggcgaagcgagacccaggatgaccttgggtctcttggta

SEQ ID NO: 16629 - RNA, 139 nt, unidentified
  source 1..139: mol_type = other RNA; note = Related to WGNU01000009.1; note = Alphaproteobacteria bacterium
tctttaaaccttgggcctttcggggctcgtggaaggagcgatccttctaacgcttgctgggcccacggccccggccgctcgacgaccggtccgcagaccagcgaagcagacacggcgaaagacacgccgtgtctatgca

SEQ ID NO: 16630 - RNA, 145 nt, Azospirillum lipoferum
  source 1..145: mol_type = other RNA; note = Related to NC_016587.1
gcccattcgctgagtgaatctctcgattcactcgtgggagatatataaatctcctaacatcctgcacgggtggtccggcgacgcggcgacgcggcggcggccgtccgcaggcggcgcggggccggggcaccggccccgcgccggg

SEQ ID NO: 16631 - RNA, 147 nt, Azospirillum oryzae
  source 1..147: mol_type = other RNA; note = Related to NZ_FXAK01000010.1
acgcccattcactgagtgaaccacatggttcactcgcgggagatgtaaaaatctcctaacatcctgcacgggtggtccggtggcgcggcaacgcggcggcggtcgtccgcaggcggcgcggggccggggcaccggccccgcgccggg

SEQ ID NO: 16632 - RNA, 142 nt, Azospirillum thermophilum
  source 1..142: mol_type = other RNA; note = Related to NZ_CP029353.1
gcccattcactgagtaagtcatcggacttactcgtgggaggtgttaatgcctcctaacaaactgtggcggtggtgcggcgcggcgacgcggcgacgtccgtccgcagacggcgcggggccaggacattggccccgcgctggg

SEQ ID NO: 16633 - RNA, 123 nt, Microvirga sp.
  source 1..123: mol_type = other RNA; note = Related to JABMLM010000386.1
ccatcattcactgaggctccatccggagccttgcggaaggcaaacgccttctaccattcggccggttcgtgctgagcgcgcggtccggacgggcgtgcccccgatggcgggggcacgcccgta

SEQ ID NO: 16634 - RNA, 135 nt, Pseudoxanthomonas sp.
  source 1..135: mol_type = other RNA; note = Related to RRYK01000010.1
tcgcaaacggctgagtgtgatgcactcgaggggatcagatccctacgacatccggcggacgacccggcttatggccgcacgggaaacgtctatccggtcaggtggctgcggcgaaggcacgcagccaaagatgga

SEQ ID NO: 16635 - RNA, 138 nt, Luteimonas sp.
  source 1..138: mol_type = other RNA; note = Related to NZ_LASZ01000005.1
tcgcaacgacgtgagtgggcaaccactcgtgggacgcaagtcccgacacattcccgaagccatcgtcccgtcatgcccgggcgatccagcgagggggtcaggtggctgcgtcgtgaggccgcagccaagtggtcagag

SEQ ID NO: 16636 - RNA, 127 nt, Xanthomonas hydrangeae
  source 1..127: mol_type = other RNA; note = Related to LR990730.1
tcgcaaacagttgggccgcaaggcctgtggaggcaattgcctctaaccgctccagcccagcggcgattcggtcttccggctcgtcgacggaacggagggacgatgagcgacgcgcggcgtgaccgga

SEQ ID NO: 16637 - RNA, 174 nt, Klebsiella michiganensis
  source 1..174: mol_type = other RNA; note = Related to NZ_CP061930.1
acgccatcaattgggcatttatgtccgtggaaagcttacgctttctaacatttaccccgcgcaacgcctcagggcctcgcagcgacactgctcgtaagagtcatcgctggctcagatggtatggcgtatgggtattcgaaccctttgggcgaccaagggttcgtggagcagggg

SEQ ID NO: 16638 - RNA, 157 nt, Escherichia coli
  source 1..157: mol_type = other RNA; note = Related to CP056584.1
tcgccatcaattgggtattttttacccgtggaaagttaacactttctaccgtttaccccgcgcaacgcccctgccagcgacaagagtcacaggaccaggtggtatggcgtatgggaattcgaaccctttgggcgacaaagggttcgtggagcaggga

SEQ ID NO: 16639 - RNA, 167 nt, Enterobacter hormaechei
  source 1..167: mol_type = other RNA; note = Related to NZ_JAIFPH010000003.1
tcgccatcaattgggtattgattacccgtggaaagcagatgctttctaacctttaccccgcgcaacgcccctgagcgacgcagctcgcgagagtcatcgtatgtccaggtggtatggcgtatgggtattcgaaccctttgggcgaccaagggttcgtggagcagggg

SEQ ID NO: 16640 - RNA, 157 nt, Escherichia coli
  source 1..157: mol_type = other RNA; note = Related to UGAA01000001.1
tcgccatcaattgggtatttattgcccgtggaaagctaatgctttctaacatttaccccgcgcaacgcctctgtcagcgacaggagtctctgattcaagcggtatagcgtatgggtattcgaaccctttgggcgacaaagggttcgtggagcaggga

SEQ ID NO: 16641 - RNA, 170 nt, Enterobacter sp.
  source 1..170: mol_type = other RNA; note = Related to CP074170.1
tcgccaccaattgggccttaattgcccgtggaaagcttcggctttctaaaatttaccccgcgcaacgcctctgtgcgcctgagcggctcgtgagagtcaccactggtccagatggtatcgcgtatgggtattcggaccccttgggcgaccaagggtccgtggagcagggg

SEQ ID NO: 16642 - RNA, 156 nt, Escherichia coli
  source 1..156: mol_type = other RNA; note = Related to CP023960.1
tcgccatcaattgggtaactttacccgtggaaagttaacgctttctaacatttaccccgcgcaacgcccctgccagcgacaagagtcacaggatcaggcggtatggcgtatgggtattcgaaccctttgggcgaccaagggttcgtggagcagggg

SEQ ID NO: 16643 - RNA, 172 nt, Acerihabitans arboris
  source 1..172: mol_type = other RNA; note = Related to NZ_WUBS01000011.1
ccgccatcaattgggttaatagcccgaggaaagctttgtgctttctaccatttatcccgcgcaacgcccctgtcggctgtggtgtcctcggaaagctgggtcatcgtagagtaggtggtatggcgcatgggtattcgaagcattgggcgaccaatgcttcgtggagctggga

SEQ ID NO: 16644 - RNA, 154 nt, Escherichia coli
  source 1..154: mol_type = other RNA; note = Related to CP010122.1
tcgtcatcaactgagttgtaaaactcgcggaaagcttaaccgctttctacctatttacccccacgcatggctcctgacgcctccgggcagtactggcagcatagcatgatgggtattcgaaccctctgggcgacagagggttcgtggagcgggg

SEQ ID NO: 16645 - RNA, 208 nt, Vibrio splendidus
  source 1..208: mol_type = other RNA; note = Related to MCYV02000002.1
ccgccacttattgaacattcgtgttcgaggaaagtttaggctttctaccatatttcccccatgcctcgctctcaacaaccctgtgccatcaggtgccttgaacagccatacggttgaacattgcaatctggataaatcagtagaattgaatagcatggacatgatgggaattcgcacttttgggcgaccaaagtgcgtggaaccgggg

SEQ ID NO: 16646 - RNA, 205 nt, Vibrio splendidus
  source 1..205: mol_type = other RNA; note = Related to PIFL01000078.1
ccgccacttactgagcattcgtgctcgaggaaagtttaggctttctaacattttcccccatgcctcgctatcaaccccctgtgctatcaggcgccttggacaacttacggttgcacatcgctatctagataggtcagtagaattgaaaagcatggacatgaagggaattcgcacttttgggcgaccaaagtgcgtggaaccgggg

SEQ ID NO: 16647 - RNA, 153 nt, Vibrio cholerae
  source 1..153: mol_type = other RNA; note = Related to VTLM01000009.1
acgccattaactgagatacttaggtactcgtggaaagtgtaaatactttctaacaacttcccccacatgccccgtcgctccaccgcgtgtgttgcatgacatggacatggggaattcgcgactttggggcgacccaaagtcgcgtggaacggg

SEQ ID NO: 16648 - RNA, 149 nt, Grimontia hollisae
  source 1..149: mol_type = other RNA; note = Related to NZ_CP035690.1
tcgccatcaactgaacatacaatgttcgtggaaagacgaagttctttctaacattttcccccatgcctggtcgcttcatcactgatgatgcatgacatgacatgaaggaattcgcaactttggggcgacccaaagttgcgtggaacggg

SEQ ID NO: 16649 - RNA, 148 nt, Providencia rettgeri
  source 1..148: mol_type = other RNA; note = Related to NZ_CP058958.1
tcgccattaattgaatatttcggtattcgcggaaagacttgtctttctacctacttcccgcatgcctagtcgcttcacggttgtgttgcatgacatgaacatgatggaattcgcaactttggggcgacccaaagttgcgtggaacggg

SEQ ID NO: 16650 - RNA, 171 nt, Vibrio alginolyticus
  source 1..171: mol_type = other RNA; note = Related to NZ_CP054700.1
tcgccatcaactgagtgcaaactcgaggaaagtttcggactttctgccttttcccccgtgcgtgttcccttcgccgtcgcttgatgttcatcatcaggttgctggataagactgagaacgaaagcgcgggcgggtttcgaacctttgacgaacaaggttcgtgaaatggga

SEQ ID NO: 16651 - RNA, 144 nt, Aliivibrio fischeri
  source 1..144: mol_type = other RNA; note = Related to NZ_LTYZ01000001.1
tcgccatatattgagtgtttacactcgtggaaagtttactttctgactttttcccccacatgtccgttcgtctcgcctcgcgcctgatgacatcaacatgtaaggaattcgcaatcttggcgagcaagattgcgtggaacggga

SEQ ID NO: 16652 - RNA, 145 nt, Vibrio metoecus
  source 1..145: mol_type = other RNA; note = Related to NMSO01000008.1
ccgccactaactggactatgtccgaggaaagagcaatctttctacccttttacccccacatgcttggcttcgttacatcagtgacagcatgaacatgggagggtactcgaaccttttgggcgaccaaaggttcgtcgagacgggg

SEQ ID NO: 16653 - RNA, 148 nt, Vibrio splendidus
  source 1..148: mol_type = other RNA; note = Related to PIFP01000042.1
tcgccatatattgagccgtaaggcttgagggaaagcctagctttctaccctattgacccgcacatgactaacagtgacctcgtgagcaccgttcggaacatgtgggaattcgaactttttgggcgaccaaaagttcgtcgagatgggg

SEQ ID NO: 16654 - RNA, 151 nt, Vibrio fluvialis
  source 1..151: mol_type = other RNA; note = Related to CP073273.1
tcgtcacttattgagcttatttagctcgtgggaaaacgaaagttttctgcctttttgacccatacatgcctagcagtgaccatgatgagcaccgttcagaacatgtgggaattcgaaccttgggacgaaaccaaggttcgtcgagacgggg

SEQ ID NO: 16655 - RNA, 158 nt, Shewanella algae
  source 1..158: mol_type = other RNA; note = Related to JADZHF010000006.1
tcgccaccaacttgggcttagcttttaaagtaggctcgtgggaaagcaattgctttctaccttttatacccagacatgcctgccgtagctcgatgagggacgcgcgtagaacatgtgggaactcgagccctaggcgacctgggctcgtcgaaacgggg

SEQ ID NO: 16656 - RNA, 165 nt, Shewanella decolorationis
  source 1..165: mol_type = other RNA; note = Related to AXZL01000070.1
acgccataaattgaactctgctttggcagggagttcgtgggaaagcgaaagctttctgcctgttaacccagacatgcctgccgtcctaccgtcgctcgacgagagacacgcgcggtacatgtgggaactcgaaccttcgggcgaccgaggttcgtcgaaacgggg

SEQ ID NO: 16657 - RNA, 154 nt, Photobacterium profundum
  source 1..154: mol_type = other RNA; note = Related to NC_006371.1
tcgccaaaaaatgagttaactttttgttactcgagggaaattttatttcctacctatttcccccatgcacgtctctttacggctacggctgcagctagacattaacatgagagggtatcgcacccagaggcgactctgggtgcgtggaacgggg

SEQ ID NO: 16658 - RNA, 153 nt, Aeromonas salmonicida
  source 1..153: mol_type = other RNA; note = Related to NZ_CP060032.1
tcgtcatgtgtttgagctatttattttgctcgcgggaaatttcggtttcctaaattctccacgcgcttcgcctgccaccggtcctggaccatggcgcggcatcaacgtgaggggactcgcgaattggggcgacccaattcgcgtggaacgggg

SEQ ID NO: 16659 - RNA, 151 nt, Aeromonas caviae
  source 1..151: mol_type = other RNA; note = Related to JAEHHN010000014.1
gcctactacatagagcgttacgctctgggagacgattgtttcctaaattctccacgcgcctgcctgtgtccccatcctcgcgatgcggtcatgcggcgatcacgtgatggggactccgcgaacaggggcgaccctgttcgcgtggaacggg

SEQ ID NO: 16660 - RNA, 180 nt, Obesumbacterium proteus
  source 1..180: mol_type = other RNA; note = Related to LXEX01000068.1
cagttttacatgagtagatttacgaatttactcgcggaggattttatcctctacatagttacccccacctgatgacgttggctccgtagctaatcttatcgctgtgtaacgtagtgttgcgcatgtaagggtcgagggtattctgattgtggtggcgacaccacaatcagattgaaaagg

SEQ ID NO: 16661 - RNA, 152 nt, Cellvibrio sp.
  source 1..152: mol_type = other RNA; note = Related to NZ_CP031727.1
tcgccatcgcctgagtttgatgtattggaactcgcggagagcttgctctctaccaattacccgcccaagcagcgttaggccttatacgcttatccagcatggcagcgagtacacacccgtaggggcgaatccctacgggtggaaaacaaggg

SEQ ID NO: 16662 - RNA, 157 nt, Cobetia pacifica
  source 1..157: mol_type = other RNA; note = Related to NZ_CP047970.1
ccatcgtaattgagcaagtttagtttcttgctcgtggaggtatgacctctaccctttacccccgcagatgtccggccaactatcagttatggcggcctacgtagatgctgggaacatcacaccgtgtgtgcgactgcacacggtgtgggaaataggg

SEQ ID NO: 16663 - RNA, 135 nt, Photobacterium gaetbulicola
  source 1..135: mol_type = other RNA; note = Related to JWLZ01000077.1
tcgccactatttgagtgtttacactcgaggaaaatcttttgattttctgccatttacacccgcacgctccgtccacctatgtgacatgtccgtgagggatgcagacgctggcgagctagcgtctgaagactaggg

SEQ ID NO: 16664 - RNA, 164 nt, Shewanella benthica
  source 1..164: mol_type = other RNA; note = Related to NZ_LS483452.1
tcgccattacattgaatgcttgcattcgtggagaactaataattctctaacatttacccccgcacaacgtcctgctcgcctcgaccttctggtacgtgatgaacaataagtggcatgtggggggactcggatacggtgcgagcgccgtatccggaaaactaggg

SEQ ID NO: 16665 - RNA, 158 nt, unidentified
  source 1..158: mol_type = other RNA; note = Related to MZ568827.1; note = Shewanella phage vB_SspS_MuM16-1
tcgccataacaagtgcctgcttttaatttggggcgtggagaagaaattctctaacattttgaccgccgcacgatgcccagcagctcatgtagttctgcatcgggatcacgtgggggggactcggctacggggcgagctccgtagccggaaaactaggg

SEQ ID NO: 16666 - RNA, 150 nt, Colwellia piezophila
  source 1..150: mol_type = other RNA; note = Related to NZ_KB905161.1
ccatttagaactgaatgcttgcattcgaggagaatcttgaattctctaacctttttcccccacatgtgctcatcagataacttaacttaactatgtagcaagattggtaggggacacacaccgcgggcgaacccggtgtgtaaaacgagg

SEQ ID NO: 16667 - RNA, 139 nt, Teredinibacter turnerae
  source 1..139: mol_type = other RNA; note = Related to NZ_KB889976.1
ctgttgtagttgagaggtaattctctcgcggaggtcatgagatctctaccttttgccccgcacatgcctgacctcatggttaagcagcgatgcgagagcgagcactctgtggtggcgacgccacagagtgcggaaagga

SEQ ID NO: 16668 - RNA, 169 nt, Pseudoalteromonas sp.
  source 1..169: mol_type = other RNA; note = Related to JABEPJ010000003.1
aagtgtatattgagtatttatttatactcgtggaaagataatatctttctgacctcttcctgcgcacttcctgctcccccttggaaccttatggtatcaatggtaagtatcgtgaaattaagcgtaggaaggacaacgtggggcgaagaaccacgttgtgaaaatcagg

SEQ ID NO: 16669 - RNA, 173 nt, Colwellia sp.
  source 1..173: mol_type = other RNA; note = Related to NZ_JACGUS010000120.1
tcgccaagtgtatttgagtatgattttatactcgcggaaagataatatctttctacccttttcctgcgcacttcctgctcccccttggaaccttatggtatcaatcggtaagtatcgtgaaattagcgttgggatagacaacgtggggcgaacccacgttgtgaaaatcaggg

SEQ ID NO: 16670 - RNA, 156 nt, Alteromonas macleodii
  source 1..156: mol_type = other RNA; note = Related to NC_018692.1
tcgccaaataactggatgttttcggatgtccgtggaaagctttgctttctatcatttccctgcgcacttcctgctacccttgggcttccttggttggtatcgtgataagaccgtaggggccacaccgtgggcgaaaccacggtgtgaaaattaggg

SEQ ID NO: 16671 - RNA, 157 nt, Pseudoalteromonas sp.
  source 1..157: mol_type = other RNA; note = Related to PNDR01000076.1
tcgccaaccaattgaatacctccgggtgttcgtggaaagcttaagctttctgtctttttccctgcgcaactcctgctacccttggaaatccttggttagtatcgtgagaaatacgtagggtagacaccgtgggcgaaacacggtgtgaaaattaggg

SEQ ID NO: 16672 - RNA, 130 nt, Pseudoalteromonas phenolica
  source 1..130: mol_type = other RNA; note = Related to PPSX01000023.1
tcgctatcacttttaggcttttgcctgcggagatttatctctaccttttttctgcgaactgttccgttgcttgcaattgtgaatatacgtagagagacgcacgaggcgagaaactcgtgcgtaaaaggga

SEQ ID NO: 16673 - RNA, 145 nt, Halomonas sp.
  source 1..145: mol_type = other RNA; note = Related to NVVS02000010.1
cactagtttattgagtgggttaccactcgcggagacatagtctctaccttttgcgccgctcatgctgccgggtcacgctagattgatccatcaagcccaagtgtgcgttcacgtcgtggggtgatgccacgacgttaaaacaggg

SEQ ID NO: 16674 - RNA, 148 nt, Alcanivorax hongdengensis
  source 1..148: mol_type = other RNA; note = Related to NZ_AMRJ01000028.1
caccagtcaattgagtaggttcaacctactcgcggagacgaagtctctatattttgcgccgctcatgcagccgggtcatgctctatcgatccatcaagctcaagtgtgcgtgcacgtcgtgtggtgactacacgacgtgaaagcaggg

SEQ ID NO: 16675 - RNA, 150 nt, Alcanivorax sp.
  source 1..150: mol_type = other RNA; note = Related to JAFMPS010000045.1
caccagttaactgggtaggctttgtctactcgcggagacttaggtctctaccttctgcgccgctcgtgctacgcgattcatgctccaacgattcatgcagcccaagcgtgcgtccacgtcgtgtggtgacaacacgacgtgaaagcaggg

SEQ ID NO: 16676 - RNA, 146 nt, Legionella sp.
  source 1..146: mol_type = other RNA; note = Related to RZGU01000003.1
acctgttaattgaatatgtttacatattcgcggagatagagtatctctacttttcgctcggctcatgttgtttgaattgctattgatataccatgaagcacaagcgagtgtccgtcgtgcagtgacatcacgacgggttaataagg

SEQ ID NO: 16677 - RNA, 141 nt, Marinobacter sp.
  source 1..141: mol_type = other RNA; note = Related to NZ_KB889904.1
tagccaagcaactgagtggaaacactcgcggagaatttattctctaccttactgggccgctagcgtcgtcatgagatcacctgtgatgtaacgtgcgagctgataccacgtgttggcgacaccacgtggtagaaacagggg

SEQ ID NO: 16678 - RNA, 128 nt, Acinetobacter chengduensis
  source 1..128: mol_type = other RNA; note = Related to NZ_RCHC01000004.1
gcctacctatttgagtatttatactcatggagcttgtctctaactattttgcggctcatgctgtacacgtacagccacaacccgcgaaagcgcgcattcggggcgacacccgaatgcgcgaaagcaga

SEQ ID NO: 16679 - RNA, 121 nt, Acinetobacter baumannii
  source 1..121: mol_type = other RNA; note = Related to JAIWSZ010000041.1
ccacttaatatgagtgtttcactcatggggagcttccctaacttttttgcggcacaagctgacattcagtagcaaaccgcaagagagtgcgcgccgggcgaccagcgcgcacaaaacaaga

SEQ ID NO: 16680 - RNA, 139 nt, Psychrobacter sp.
  source 1..139: mol_type = other RNA; note = Related to VOBE01000007.1
tcatgaatattaggtaagttttttacctgcggaggattagaaccctctaccttttgctgggctcatgcgtcctttattcgacgtgttgtaatagttcggtatggtgcttgcttgcgacgagagcaagcaagcacctgtt

SEQ ID NO: 16681 - RNA, 140 nt, Psychrobacter aquaticus
  source 1..140: mol_type = other RNA; note = Related to AUSW01000014.1
tcatgaatattaggtaagtttttttacctgcggaggattagaatcctctaccttttgctgggctcatgcgtcctttgttcgacgtattgtaatagttcggtatggtgcttgcttgcaatgagagcaagcaagcacctgtt

SEQ ID NO: 16682 - RNA, 141 nt, Psychrobacter sp.
  source 1..141: mol_type = other RNA; note = Related to NWFK02000001.1
tcattaatattaggtaatattttacctgcggagaattaattttctctacctcttgccgggcacatgcgttctcgactcgacgtatcataatagctcggtatatagtgcttgcttgcgatgagtgcaagcaagcactctgta

SEQ ID NO: 16683 - RNA, 138 nt, Psychrobacter sp.
  source 1..138: mol_type = other RNA; note = Related to NZ_CAJHBG010000001.1
tcatgaatattaggtaaaattttacctgcggagaattagttttctctacctcctactgggctcatgcgttctcgactcgacgtattacaatggttcggtatggtgcttgcttgcaatgagagcaagcaagcacctgta

SEQ ID NO: 16684 - RNA, 144 nt, Psychrobacter namhaensis
  source 1..144: mol_type = other RNA; note = Related to NZ_JABUZJ010000058.1
tcatttaatttaggtaactatgttgcctgcggagaatgcaaattctctaactcttgctgggctcatgcgtcaattactcgacgtataataatatctcagtagtgttgttgcttgcgatgagagcaagcaacaaccttgttagga

SEQ ID NO: 16685 - RNA, 146 nt, Psychrobacter sp.
  source 1..146: mol_type = other RNA; note = Related to NZ_CAJHAZ010000027.1
tcattgttatttaggtatcaattcatacctgtggagaatatttattctctaatcctttcccgggtattgtgaactctacggacacagagagcataataaccgagggttcacactcttgcgatgagcgcaagagtgtggcattggga

SEQ ID NO: 16686 - RNA, 200 nt, Citrobacter freundii
  source 1..200: mol_type = other RNA; note = Related to VHJG01000001.1
tcgcaaaagcttgatggtctgctagtcagccatcgtggaggcttcggcctctattctctccccacacgacgcatgccacacgttctcaatgttccaacgtaacgatgctaacgcatcaccagcgccttggtacatgcagcaacagttggaattgccgggttgtggcgaggggacgtcacacagtgacgtcgaatactggg

SEQ ID NO: 16687 - RNA, 202 nt, Kosakonia oryziphila
  source 1..202: mol_type = other RNA; note = Related to NZ_FMBC01000051.1
tcgcaaaagcttgatggtctgcttgtcagccgtcgtggaggtttcggcctctaatctctcccccacacgacgcatgccgcgcttacgcagtgttccacgcgttacgatgctacgcatcaccgacgctctggttcgtactgggacagcttggattgctgggattgtggcgagaggacgtcacgctgtgacgtcgaaaactggg

SEQ ID NO: 16688 - RNA, 201 nt, Pectobacterium brasiliense
  source 1..201: mol_type = other RNA; note = Related to JAFJZU010000002.1
tcgcaaaagcttgatggtctgcttgtcagccatcgtggaggtttcggcctctaatctctcccccacacgacgcatgccacgcttgctcaatgttccaacgttacgatgctacgcatcaccgacgctctggttcgtgccgagacagctgggattgctggatttgtggcgagaggacgtcacgctgtgacgtcgaaaactggg

SEQ ID NO: 16689 - RNA, 201 nt, Pectobacterium polaris
  source 1..201: mol_type = other RNA; note = Related to NZ_JAESHX010000078.1
tcgcaaaagcttgatggtctgtttgtcagccatcgtggaggccttggcctctaatctctccccacacgacgcatgccacatgttctcaatgttccaacgttatgatgctaacacatcaccaacgctctggtactttctgtaacagttgggattgccgggattgtggcgaggggacgtcacacagtgacgtcgaatactggg

SEQ ID NO: 16690 - RNA, 193 nt, Pantoea stewartii
  source 1..193: mol_type = other RNA; note = Related to JACETZ010000001.1
tcgcaaaagcttgatggtctgcatagcagccattgtggaggtttatgcctctattctctccccacacgacgcagctgttgctaacttaccgatggttcaggtgtaacgcatccatccatccggtcaatccgtaacggtctgttatgctcgtatcgtggcgagggtgacgtcacatgtgacgtcgaatactggg

SEQ ID NO: 16691 - RNA, 130 nt, Paenibacillus sp.
  source 1..130: mol_type = other RNA; note = Related to CP013653.1
tcccctaaattggagtgtaacaacactcgcggagtacctttactggtattctaactcttaaaagccgacatgtggttgaccgccaccatgcggcgagccgcgcgctgggagatgcgcgcggcgaaatgaa

SEQ ID NO: 16692 - RNA, 126 nt, Paenibacillus algicola
  source 1..126: mol_type = other RNA; note = Related to NZ_CP040396.1
tcccaccaactggagtgtttacactcgaggaatacttttaaagtattctaccaaaatagggcaggcgtgtggtgacacccgttcttccccaccgcgcgctgggagctgcgcgcggtgcagaatgaa

SEQ ID NO: 16693 - RNA, 134 nt, unidentified
  source 1..134: mol_type = other RNA; note = Related to JAFYLK010000105.1; note = Clostridia bacterium
tcccctcaattggaactctttgagttcgcggagcagaaatgctctaccccgaggggggcggcatgtgtttggcctgagcggtccgatgctgttcgtcctaccccagcgagcccgccgggatcgggctcgcagaa

SEQ ID NO: 16694 - RNA, 136 nt, Ructibacterium gallinarum
  source 1..136: mol_type = other RNA; note = Related to NZ_JADCKB010000021.1
tcctctaaattgaagtgtacaatacacttgcggaacacatattgtgttctaccttaaacggggctacatgtagcttgaccagcccaacatggcatgcccgtccgtgcgccacaggagcttgcgcacggttaacaaa

SEQ ID NO: 16695 - RNA, 150 nt, Coprococcus sp.
  source 1..150: mol_type = other RNA; note = Related to QTZF01000005.1
tcccataaattggagcgcttagcgcttgaggaacattcttaaatgtggatgttctactgttaggggccggcatgttacgcaaagacccgtagcacgctgcaagcaccgcacgctctgcctcgctcggggagctcggcagagctcaaaggg

SEQ ID NO: 16696 - RNA, 145 nt, Faecalicatena contorta
  source 1..145: mol_type = other RNA; note = Related to JAFBIY010000001.1
tcccataaagtggagtgcaatagcacttgaggagcatctttgcatgctctactgttaggggccggcatgttacgcaaagacccgtagcacgctgcaagcaccgcacgctctgcctcgctcgggaagctcggcagagctcaacgga

SEQ ID NO: 16697 - RNA, 146 nt, Clostridium indicum
  source 1..146: mol_type = other RNA; note = Related to NZ_QOHO01000034.1
tcccataaattggagtgtatttgcacttgaggagcatcttagtatgctctacggttaggggccggcatgttacgcaatgacccgtggcacgctgctagcaccgcacgctctgcctcgctcgggggagctcggcagagctcaatgga

SEQ ID NO: 16698 - RNA, 144 nt, unidentified
  source 1..144: mol_type = other RNA; note = Related to FCNR01000043.1; note = Eubacteriaceae bacterium CHKCI004
tcccacaaattggagtgcattagcacttgaggagtatcgtatgatactctaccttaaggggccggtatggtacgaagagacccgtagcacaccgcaagcccgcacgctctgccgagctcgggaagctcggcagagctcaaagga

SEQ ID NO: 16699 - RNA, 143 nt, Clostridium sp.
  source 1..143: mol_type = other RNA; note = Related to NZ_GL870812.1
tcccataaaatggagtgcgtcagcacttgaggagtaccaattgagtactctacagttaggggccggcatggtacgtaaagacccgtggcacgcccgcaccgaacgcatcgccgagctcgggaagctcggcgatgcgcaatgaa

SEQ ID NO: 16700 - RNA, 135 nt, unidentified
  source 1..135: mol_type = other RNA; note = Related to JAFQBX010000034.1; note = Clostridia bacterium
ccccctaatctggagtatgtaaatactcgtggaacatcctatgggtgttctaattagcggggcggcacacgtgttgaccaacgatgtgctgcaccccgcggcttgcccaaggggcttgggcaagccgccaaatta

SEQ ID NO: 16701 - RNA, 136 nt, Flavonifractor plautii
  source 1..136: mol_type = other RNA; note = Related to CP095094.1
tcccctaaattggagtgtataaacactcgcggaacatcttgaaggtgttctaccccacgggggcggcacacggcttgaccgcccgatgcgccgtcgcccggcatggcccaagccgggagcttgggccatgcccaaa

SEQ ID NO: 16702 - RNA, 143 nt, Ruthenibacterium lactatiformans
  source 1..143: mol_type = other RNA; note = Related to JAFHCI010000085.1
tcccctaaattggagtgcatgatatgcactcgcggaacatcttcgtggtgttctaccccacggggacggcacacggcttgaccgcccgatgcgtcgccacccgtcatggcccaagccgggcgcttgggccatgaccaaaagaa

SEQ ID NO: 16703 - RNA, 138 nt, unidentified
  source 1..138: mol_type = other RNA; note = Related to JAFWRN010000131.1; note = Clostridia bacterium
tcccctcaactggagtgcattgcactcgcggagcatctttatggtgctctaccctacgggggcggcacatggcttgaccatccgatgcgccgtcacccgcatggcccagccgggaggcctgggccatgcgcaaaggaa

SEQ ID NO: 16704 - RNA, 143 nt, unidentified
  source 1..143: mol_type = other RNA; note = Related to DVNI01000021.1; note = Candidatus Avacidaminococcus intestinavium
tcccctaatctgaagcattattgcttgtgggacaattatatttgtcctaatttctaagggcagcccaagagttcaggccccgtccgactcgtatgcgtccgcagaaacggtcccggctgggatccgggaccgtttaaactgaa

SEQ ID NO: 16705 - RNA, 145 nt, Lampropedia sp.
  source 1..145: mol_type = other RNA; note = Related to STFG01000036.1
agttgttggagaggtctggatacagacgttgatttgcttgataagcgtatcagcaagacggaggcgggtactaccatccgtctcttcttcgaagagagttagtcgcagggtttggccatggtggatatggctgttgccaacgact

SEQ ID NO: 16706 - RNA, 148 nt, Rubrivivax gelatinosus
  source 1..148: mol_type = other RNA; note = Related to NSLA01000001.1
agttgttgggcaggtctggaaacagacgtcaatcgagtgctttatgtcgattggctagtggggagacggtcactaccgtccgtctcttcgctcgaagagagttagtcgcagggtttggccatggtggaagtggcagctaccaacgact

SEQ ID NO: 16707 - RNA, 150 nt, Comamonas sp.
  source 1..150: mol_type = other RNA; note = Related to JAHUXB010000001.1
cgttgttgggtaagtctgtaaaccagacgctgacttgtgcttttgtcgcaggttggcttgtggggaggagggggcaccgtccgcctcttcgcctcgaagagagttagtcgcagggtttggccatgaagggtatggcagttaccaacgact

SEQ ID NO: 16708 - RNA, 148 nt, Burkholderia ubonensis
  source 1..148: mol_type = other RNA; note = Related to NZ_LOXM01000118.1
agtcattggacattgtctggtaacagacgtcggcgttcgcaggtgatttgccggctttcggggaggggcgactaccgtccgtctcttcgccccgaagagagttagtcgcagggtttggccatgaagggcgtggcggcatccaacgact

SEQ ID NO: 16709 - RNA, 146 nt, Ralstonia insidiosa
  source 1..146: mol_type = other RNA; note = Related to NZ_PKPC01000024.1
agttgtttggattagtctggaaacggacgtcaatctaatctttgttagatgacttgcggggaggagcggccaccgtccgtctcttcgcctcgaagagagttagtcgcagggtttggccatgaaaggcatggcagcttccaacgact

SEQ ID NO: 16710 - RNA, 150 nt, Variovorax sp.
  source 1..150: mol_type = other RNA; note = Related to VIVL01000004.1
agttgttagataagagtctggaagcagacgtcagtctatgaagttcatagtctggcttgaggggtgaggggggttaccatccgtcccttcgtcccgaagagagttagtcgcagggtttggccatgatgggtatggcagtagctgacgact

SEQ ID NO: 16711 - RNA, 146 nt, Variovorax boronicumulans
  source 1..146: mol_type = other RNA; note = Related to NZ_MRCN01000006.1
cgttgttggataagtctggaaacagacgtcgatctataagttcgtagatcggcttgcggggaggagcggccaccatccgtctcttctccccgaagagagttagtcgcatggtttggccatgaagggcatggcaggtgccaacgact

SEQ ID NO: 16712 - RNA, 148 nt, Acidithiobacillus ferrivorans
  source 1..148: mol_type = other RNA; note = Related to NZ_CP059488.1
agttgttggtgatgctctgaattattagagcgtcttggttcaaaaggatcaaggcttgtcgggaggagtgataccctccgtctcttccatccggaagagagaaggacgttaggcttggccatatgaagggcggttgctaccaacagcc

SEQ ID NO: 16713 - RNA, 151 nt, unidentified
  source 1..151: mol_type = other RNA; note = Related to PDHS01000438.1; note = Candidatus Accumulibacter phosphatis
agtcgttgggcttgctcggaaacgagcgtctaaacgccactcaaaaggcgcctagacaattcgggagagggggggcaccgtccgcctcctccttcggagtagagttggtcggtaggttcagccatgggaagaatggtagctgccaacgacg

SEQ ID NO: 16714 - RNA, 150 nt, Janthinobacterium sp.
  source 1..150: mol_type = other RNA; note = Related to SORD01000001.1
tatcgccggaaaatgctcgtttacgggcgtcatacagtatgtgctgtgtggcatgtggggagggccgcaagcactctcctctctctcctaacgtcgaggagaggtagttgataggcaaggtcatgggaaaagtggcagttgccggtgata

SEQ ID NO: 16715 - RNA, 145 nt, unidentified
  source 1..145: mol_type = other RNA; note = Related to JACYUQ010000003.1; note = Oxalobacteraceae bacterium
tttcgctggttaggcttggtaacaagcgtcctgtaagcattgcgatcagggctagtggggaggcaggcactctccgtctcctccgaccccgaggagagatggacgataggcttggccatgaggaagatggcagtgtccagcgaaa

SEQ ID NO: 16716 - RNA, 145 nt, Massilia rivuli
  source 1..145: mol_type = other RNA; note = Related to WKJJ01000006.1
tatcgctggaagatgctcggaaacgagcgctttatggggcgacctgtaaggcacgtggggagggctcgcactctcctctcctctgaccccgaggagagatggacgataggcttggccatgggaaaagtggcagttgccagcgata

SEQ ID NO: 16717 - RNA, 148 nt, Chromobacterium phragmitis
  source 1..148: mol_type = other RNA; note = Related to NZ_CP029495.1
cattgctagttcgtgctcgtaatgagcgttagctaggcttgcctagctaacttgtcgggagagggcttgcaccctcctctcctccggacccggaggagagagtgacggtagatttagccacgagaaagagtggcagctactagcaatg

SEQ ID NO: 16718 - RNA, 151 nt, Paraburkholderia aspalathi
  source 1..151: mol_type = other RNA; note = Related to NZ_CAJNBE010000044.1
ggtcgctggacttgctcggtaacgagcgtctgacggcgttgttgctgtcaggcttgtcagaaggaggggtcatactctccgtctccccccgaccgggaggagagtgggacggtaggtttggccatgggaaggatggcagctaccagcgata

SEQ ID NO: 16719 - RNA, 156 nt, Paraburkholderia caribensis
  source 1..156: mol_type = other RNA; note = Related to NZ_CP012746.1
gaccgctggacttgcctggcaacaggcgttcaacagcacctagtggtgccgttgggcttgtcagaaaggggggctcacactctccgtctcctccggacccggaggagagatggacggtaggtttggccatgggaaggatggcagctaccagcggta

SEQ ID NO: 16720 - RNA, 154 nt, Burkholderia stagnalis
  source 1..154: mol_type = other RNA; note = Related to NZ_LPNA01000081.1
tgtcgttggcttgagctcggaaacgagcgcttgaagccccaatagggagttcaagctcgtcggtggggggctcacactctccgccccctccgggacccggaggagagaaggttggtaggtccggtcatgggaagagcggccgctgccaacgatg

SEQ ID NO: 16721 - RNA, 145 nt, Pseudomonas vranovensis
  source 1..145: mol_type = other RNA; note = Related to NZ_AUED01000023.1
gatcctgggttttgctcgtacgagcgtctgaagtttttgactttggacttgtccggaggctcgcacctccgatctcctccgagaaacgtggaggagacagggacggtaggtttggccatgtgaaggatggcagctgccagcgatc

SEQ ID NO: 16722 - RNA, 145 nt, unidentified
  source 1..145: mol_type = other RNA; note = Related to SEFL01000928.1; note = Sphingobacteriales bacterium
gatcctggattttgctcgttatgagcgtctgtagcgtttgcgacaggcttgtccggaggctcgcacctccgatctcctccgaaaaacctggagtagacagagacggtgggtttggccatgtgaaggatggcagctgccagagatc

SEQ ID NO: 16723 - RNA, 144 nt, Pseudomonas sp.
  source 1..144: mol_type = other RNA; note = Related to NZ_BPLZ01000021.1
gatcctggaatttgctcgttacgagcgtctgaagcatagctttgggcttgtccggaggctcgcacctccgatcccctccgaaaaacctggaggagacagggacggtgggtttggccatgtgaaggatggcagctgccagcgatc

SEQ ID NO: 16724 - RNA, 147 nt, Pseudomonas sp.
  source 1..147: mol_type = other RNA; note = Related to NKIG01000020.1
gattctggctttgctctttaagagcgtctacgagattatatatttgtaggcttatgtggaggagccctcgcacctccgccgcctcctacccggaggagcaaggaacggtagatttagccatgtgaaggatggcagtcgccagaaatc

SEQ ID NO: 16725 - RNA, 142 nt, Pseudomonas sp.
  source 1..142: mol_type = other RNA; note = Related to JACASD010000120.1
aagcactgagcaagccttgaaaaaggcactcgttgatttataacgagtatgtccggagggggggcaccgcacgccgcctccatcctggagtagcgatagacggtaggttagccaatagaggatttggtagctatcagtgtct

SEQ ID NO: 16726 - RNA, 142 nt, Pseudomonas mucidolens
  source 1..142: mol_type = other RNA; note = Related to LS483433.1
atgcactgagcacgccttgaaaaaggcacttattggttttccaatgagtatgtccggaggggggcaccgcacgccgcctccatcctggagtagcgatggacggtaggttagccaatagaggatttggtagctatcagtgttt

SEQ ID NO: 16727 - RNA, 139 nt, Pseudomonas sp.
  source 1..139: mol_type = other RNA; note = Related to NZ_BCBR01000170.1
caacactgagcacgcctgaaaaggcgctcgttgatgtctcggcgagcttgtccggaggggggcaccgtccgcctctcccgtcccggaatagtgaatgacggtaggttagccagagggaatttggtagctatcagtgtat

SEQ ID NO: 16728 - RNA, 148 nt, Pseudomonas sp.
  source 1..148: mol_type = other RNA; note = Related to NZ_RXHX01000002.1
cggcgctgagcaagcctttgtgaaaaggcgttcactgatgatttattagtgggcttgccggatgggggggcaccatgcgccttctcctgacccggagcagtgattgacggtaggttagccataggagatttggtagctatcggcgcat

SEQ ID NO: 16729 - RNA, 136 nt, Pseudomonas stutzeri
  source 1..136: mol_type = other RNA; note = Related to NZ_JAGQFP010000002.1
aatgcatcgacttcgctcttaacagagcgcttgctgtttgacagcaagcatctggggcacggacggcacgatccgcttcctagagtagcgacagacggtaggttagccatagggggtttggctggatcggcgcact

SEQ ID NO: 16730 - RNA, 142 nt, Pseudomonas kunmingensis
  source 1..142: mol_type = other RNA; note = Related to JAAMQS010000014.1
agtgcaccgtaaagctcttaggagcgctcaaagcttcaacgcaatgagcactagggacccggcgggacgatcctctatccggacccggagtagcgacagacggtaggtaagccatagagagatttggctgtatcggtgcatt

SEQ ID NO: 16731 - RNA, 144 nt, Pseudomonas mendocina
  source 1..144: mol_type = other RNA; note = Related to NZ_LR134290.1
atgcatcgaaattgctcttaattgagcgcctgtagctatgactatgggcactccgggacaccggcgggacggttcgcctcctccgagccggagtagcgacagacggtaggttggccatggggagaaatggctgtatcggtgcac

SEQ ID NO: 16732 - RNA, 144 nt, Pseudomonas aeruginosa
  source 1..144: mol_type = other RNA; note = Related to CP080287.1
gagcactgagaaggcctttgttgtatagaaggcgctcctatgggagcttttcgggcggagccccgcacagtgtgcgcctcctccgacccggagtagtgatggacggtaggttagccatagtggggttggcagctgtcagtgtgt

SEQ ID NO: 16733 - RNA, 157 nt, Serratia sp.
  source 1..157: mol_type = other RNA; note = Related to NZ_CP033831.1
aaatactgagcatgcttagttattattagtataattgagcgccttttattgttcagaaggctaattgggagagcccctgcacacggtggcctcttccgacccggaataggggggaatgacggaaaaggcatgaggttgaagagagttgtcagtgtgt

SEQ ID NO: 16734 - RNA, 140 nt, Citrobacter portucalensis
  source 1..140: mol_type = other RNA; note = Related to CP055089.1
tttaattgactaatgccgcaaggcgcttagtttgactaagctattcgggagagggccccacgcacgcccctctctcggctacgcagagtagagttggacggtaagctcgatcatgggggttatggcagttgtcagttata

SEQ ID NO: 16735 - RNA, 140 nt, Serratia marcescens
  source 1..140: mol_type = other RNA; note = Related to JTBU02000001.1
tttaactgactaaagccgcaaggcgcttagttttggctaagctattcgggagaggccacgcgcacgcccctctctcggctacgcagagtagagctggacggtaagctcgatcatggggatcatggcagttgtcagtaata

SEQ ID NO: 16736 - RNA, 140 nt, Pantoea vagans
  source 1..140: mol_type = other RNA; note = Related to MUJJ01000002.1
gttaactggcaatgcctaagggcgcttggtttctccaagctacaccgggggcagcccccccgcacatgactcaactcatgaccccgagtagagatggacggtaaactcgaccatggaaaatatggcagtagtcagttaaa

SEQ ID NO: 16737 - RNA, 144 nt, Lysobacter gummosus
  source 1..144: mol_type = other RNA; note = Related to NZ_CP091194.1
ggtcccgagcaatgctctgaatagagcgtccgagcttttacagctttggccactccggagggattcagtctccctctctctctaacgagaggagcgtgtgagagtaggtctagccatggggaaaaatggcagtaatcgggaagc

SEQ ID NO: 16738 - RNA, 139 nt, Stenotrophomonas maltophilia
  source 1..139: mol_type = other RNA; note = Related to NZ_VLXO01000050.1
cgaacagagttttgctcatcggaaattgatgggtgcccatagggctccagagggtgacctcagtctcccgcctcccaaaaaatgcaggagcggagaatggacggcctaaccaggggttggaacgcagttgctctgtttg

SEQ ID NO: 16739 - RNA, 140 nt, Stenotrophomonas rhizophila
  source 1..140: mol_type = other RNA; note = Related to WELC01000020.1
caaacagagttttgcccaccggaaaatggtgggcgcccgtaagggctccagagggaaacctcagtctcccgcctcccaaaaaatacaggagcggagaatggacagcctaaccaggggttggagcgcagttgctctgtttg

SEQ ID NO: 16740 - RNA, 145 nt, Stenotrophomonas maltophilia
  source 1..145: mol_type = other RNA; note = Related to NZ_CP052863.1
gcggaaaggctttgctcgacgctctgaccggcgtcgggcgcccgtttgggctctaccgggagacctcgagtctcccgcccttcgttcctcaggagcgggggatgggtgacctagccgggaggtcggagagctgttgccttttcgt

SEQ ID NO: 16741 - RNA, 148 nt, Stenotrophomonas maltophilia
  source 1..148: mol_type = other RNA; note = Related to NZ_JABDRS010000003.1
cgaagtggctttgcttggcgtcgcaaattggcgtcgagcgcccgattgggcttcgccgggaaactcccatgagtctcccgcccttcgttcctcaggagcgggggatgggcatcctagccgggaggtcggacagctgttgcctccttcg

SEQ ID NO: 16742 - RNA, 141 nt, Rudaea sp.
  source 1..141: mol_type = other RNA; note = Related to JAFRGP010000385.1
cttcgccaattttgctctatgagcgctcgaggaatgttttaatctcgggcacgtctgggaggtaatactctcccgctctccgttccggagaagcgtgtggtatcaggcctagggatagagagatggcggttgttggcggaa

SEQ ID NO: 16743 - RNA, 136 nt, Xanthomonas arboricola
  source 1..136: mol_type = other RNA; note = Related to NZ_MDDY01000002.1
tccagttagcattgctcgcctgagcgcatcaaagcactgctttgagcatttcggaggcttcagtctcccgccctcctttccggagaagcgcgtgttatcaggtccagggttgatgaggtggttgaagctaactggc

SEQ ID NO: 16744 - RNA, 158 nt, Thioalkalivibrio sp.
  source 1..158: mol_type = other RNA; note = Related to NC_013889.1
caacgtcgatatctggcccgctaatctgaacaacctagtgggcgtcctcggagctatagagggctagaggggcgaagttcgtaccctcctctcctccgacccggaggagagattgacaataggtccgaccatgtggtgtgtggtagtagtcggcgttg

SEQ ID NO: 16745 - RNA, 164 nt, Marinobacter sp.
  source 1..164: mol_type = other RNA; note = Related to JAGPVE010000007.1
gacctctaattgctcgttatgagcgttcgataattatcgaacttgtcggtaggagccccgcagggtccgccgcctctgaacccagagtagggtctccctcctctggctccagagtcgggagagacggtggagctggctgatagagttaggtggcatcagaggtt

SEQ ID NO: 16746 - RNA, 145 nt, Pseudomonas aeruginosa
  source 1..145: mol_type = other RNA; note = Related to CP071730.1
actcgtacgtaatactgctcttaactgagcgtccgggtgacccgggcatgtcagagggtccgcaccctccctctccttccgggacccggaagagagagtgggacggtgggctacgtcatggggaacatggcagtctgatacgagt

SEQ ID NO: 16747 - RNA, 142 nt, Salinicola aestuarinus
  source 1..142: mol_type = other RNA; note = Related to NZ_PZJP01000003.1
aagcagtggcattgcctgttgaaaggcaggcgtctcgagagaggctagagtgggagggggatggaccttgcgcgcgtctacccgcaccacctaaggatggtagacacggccagcaacctgtgaatggctgaggccgctgcta

SEQ ID NO: 16748 - RNA, 148 nt, Cobetia sp.
  source 1..148: mol_type = other RNA; note = Related to CP059843.1
tagcattggagttgatgctccgttgaatcggggcgcctgcagcgatgcaggctcgagggggctccaagcactttggcttgggcttgtgtagcaacacctctggacggtgggcgtaatcagatgaaggcaaaggctgtagtcaatgcta

SEQ ID NO: 16749 - RNA, 145 nt, Pseudomonas fragi
  source 1..145: mol_type = other RNA; note = Related to JABEMH010000004.1
atccgctggttagctcagtaatgagcgttcaatacctaggtattgaactgatgaggagagggccccggcagtctccgacccctgcgtcccgctggagtgtttcacggtggacctaccatgagaaaggtggtggttttcagcggat

SEQ ID NO: 16750 - RNA, 146 nt, Pseudomonas viridiflava
  source 1..146: mol_type = other RNA; note = Related to NZ_UUEU01000227.1
atccgctggtttagctcagaaatgggcattcaatgtaattgcattgaactgatcaggagagggcaccggcagtctccgacccccgcgtcccgctggagtgcttcacggtgggcctaccatgagaaagatggtggttttcagcggat

SEQ ID NO: 16751 - RNA, 145 nt, Pseudomonas sp.
  source 1..145: mol_type = other RNA; note = Related to NZ_CP027762.1
atccgctggttagctcagtaatgagcgttcaatgcgaaagtattgaactgatgaggagagggccccggcagtctccgacccccgcgtcccgctggagtgcttcacggtgggcctaccatgagaaagatggtggttttcagcggat

SEQ ID NO: 16752 - RNA, 145 nt, Pseudomonas sp.
  source 1..145: mol_type = other RNA; note = Related to JAGYWD010000006.1
gtccgctggttagctcagtaatgagcgttcgatgcttcggtattgaactgatgaggagagggccccggcactctccgacccccgcgtcccgctggagtgcttcacggtgggccagccatgagaaagatggtggttttcagcggac

SEQ ID NO: 16753 - RNA, 155 nt, Pseudomonas sp.
  source 1..155: mol_type = other RNA; note = Related to PCQD01000007.1
gcctgttgaaatatgctctttagggcgtctagtttaatagctagacatattgggcggggccgcggcagtctccgactcccgcgctctgcgctcccgcgttgctggagtatttcatggcgagcgcaccacgagaaaggtggctgagttcaacaggt

SEQ ID NO: 16754 - RNA, 155 nt, Pseudomonas putida
  source 1..155: mol_type = other RNA; note = Related to NZ_JAETZZ010000009.1
agtcggtgaaaatgcgtacttcggtatgcgctcagcgtttgagttgagctaatggggtggggggccccgcagtccccgacccccgcgctcccgctctcccgcaggagtatttcaaggtaggtgtagccatgtggtagtggcggtactcaccgact

SEQ ID NO: 16755 - RNA, 134 nt, Variovorax boronicumulans
  source 1..134: mol_type = other RNA; note = Related to NZ_JAAAFX010000009.1
actcgttggatttgccttcgtaagaaggcgcttgcttgcaagcgtacgggaagggacctagggtcctctctccctctcggaagagagaacgtctgtagatctagccatgggaaatttggtagtttccaacgagt

SEQ ID NO: 16756 - RNA, 139 nt, Pseudoalteromonas piscicida
  source 1..139: mol_type = other RNA; note = Related to CP011924.1
ttttgaggatatagcctgtgaattgcaggcgttcgttaaaaaacgaactcgtccgagggagcccgacactttcccactcaaacccagagtagaggttgacgtctaggctaggccgtttcgaggaatggcgtactcaaag

SEQ ID NO: 16757 - RNA, 141 nt, Pseudoalteromonas sp.
  source 1..141: mol_type = other RNA; note = Related to PNDP01000055.1
gattttgggcttaatgcctgtattgacaggcgttcgtgaaagcgaacttgaccgaggaagcccgacaccttcccactcgaaaccaagagtagaggttgacgtctaggctaggccgttttgaggaatggcgtacccaaaatc

SEQ ID NO: 16758 - RNA, 139 nt, Arsukibacterium sp.
  source 1..139: mol_type = other RNA; note = Related to LAHP01000027.1
ttgcattggtattgttcggatactcgaacgctcttatcgagcttatgagagggagccacgcgcaccctccgccactcaagaacggagtagcgtaggacggtaagcctgactttattgttctagattttaatctatgcaa

SEQ ID NO: 16759 - RNA, 135 nt, unidentified
  source 1..135: mol_type = other RNA; note = Related to PBYW01000011.1; note = Alteromonadaceae bacterium
attaatacgatattgcttacttcgagcgcccttaaaaggcttgaattggagacccgcacaccccccgccactcgcgcctctccgaggcgcagtagcgctggacggtaagcttggtcatggcagttcccgatttgt

SEQ ID NO: 16760 - RNA, 140 nt, Aliidiomarina indica
  source 1..140: mol_type = other RNA; note = Related to NZ_JACAVQ010000006.1
ttcagctgatctttctgatttaaatcagaagctctcaaattggagagcaataggggagaactccgacagcctcctcaacgaaccgccgttgagttggacggtaggatcagccatggtagatagtatcattatcagctgag

SEQ ID NO: 16761 - RNA, 134 nt, Alcaligenes faecalis
  source 1..134: mol_type = other RNA; note = Related to NZ_UFSQ01000006.1
cgcgattagcatagctttttttaaaaagcgcctggttatccaggctttaaagggaagacccgatagactgtggcccccctgcaggtgtgccttgttaggattggccagcatttaattggtagtagctaatcgta

SEQ ID NO: 16762 - RNA, 138 nt, Marinobacter zhanjiangensis
  source 1..138: mol_type = other RNA; note = Related to NZ_BMXV01000003.1
atgctaaagcgatgcttcatatgtatgaagcgctttgaaaaaagcacttccggcaagggacccagtcgcccctcctgctacgcagcagatgccggtgattgcacatggcccgagatgcagaggctgtttctttagcaa

SEQ ID NO: 16763 - RNA, 140 nt, Marinobacter salexigens
  source 1..140: mol_type = other RNA; note = Related to NZ_NIHC01000001.1
gcgctaaagcgatgcttcatagaatttatgaagcgctttgagaaaagcacttccggcaggggatttagtcgccccaactgctacgcagtagatgtcggtgattgcacgggccggaaacgcagaggctgtttctttagcga

SEQ ID NO: 16764 - RNA, 141 nt, Shewanella algae
  source 1..141: mol_type = other RNA; note = Related to CP034246.1
tcgctaaggtatgcttttaatattttagaagcgcctaaaataaggcttatccggcaaggtcgattccgtcgcccctcctgtcaagacagcagatgtcggtgattgcacaggctagaagcacagaggccgtcttcttagtga

SEQ ID NO: 16765 - RNA, 155 nt, Luteimonas sp.
  source 1..155: mol_type = other RNA; note = Related to NZ_VSSP01000009.1
cgggttcggtatacgcgtactgcgtatttctagcagtgcgcgcttagcgtcaaagctaagctctaagggacatgcggttccgccgccctccgaaaccggaggagctttcccgaaggtggatcaagccagcacgagagcggcagttgctgaacctt

SEQ ID NO: 16766 - RNA, 153 nt, Proteus sp.
  source 1..153: mol_type = other RNA; note = Related to DPFJ01000041.1
aattgctagctttgcttccttatggaagcgtctgactaagtatattataagtcagactcgatccgaggccccaccgccgccagacgacggctggtgccgtagctgtcgggcattacttacggtcgtaagtagcagaggctgttgctagcaatg

SEQ ID NO: 16767 - RNA, 140 nt, Leclercia adecarboxylata
  source 1..140: mol_type = other RNA; note = Related to NZ_CP035382.1
atttgctagctttgcctccttctgggggcgtctggtttaccagactcgatccgaggccccaccgtcgccaccgacggctggcgccgtagctgtcgggcattacttacggtcgtagaacgcagaggctgttgctagcaatg

SEQ ID NO: 16768 - RNA, 140 nt, Yersinia kristensenii
  source 1..140: mol_type = other RNA; note = Related to CP008955.1
aattgctagctttgcttccttagggaggcgtctggtttaccagactcgatccgaggccccaccgtcgccatcgacggctggcgccgtagctgtcgggcattacttacggtcgtagaacacagaggctgttgctagcaatg

SEQ ID NO: 16769 - RNA, 140 nt, Enterobacter quasimori
  source 1..140: mol_type = other RNA; note = Related to NZ_JAHEVU010000002.1
atttgctagctttgcttccttagggaagcgtctggtttaccagactcgatccgaggccccaccgccgccaacgacggctggtgccgtagctgtcgggcattgcttacgatcgtagagaacagaggctgttgctagcaata

SEQ ID NO: 16770 - RNA, 139 nt, Escherichia coli
  source 1..139: mol_type = other RNA; note = Related to NZ_LR778152.1
atttgctagcttttgccccctagggggcgtctggttatccagactcgatccgaggccccaccgccgccaacgacggctggcgccgtagctgtcgggcattacttacggtcgtagagaacagaggctgttgctagcaact

SEQ ID NO: 16771 - RNA, 139 nt, Pectobacterium aroidearum
  source 1..139: mol_type = other RNA; note = Related to JACFXZ010000002.1
aattgctagctttgcttccctagtggaagcgtctgggtaaccagacacgatccgaggccccaccgtcgccacccacggcggtgccgtagctgacggcattacttacggtcgaggaaaacagaggctgttgctagcaatt

SEQ ID NO: 16772 - RNA, 145 nt, Serratia marcescens
  source 1..145: mol_type = other RNA; note = Related to NZ_HG738868.1
ttttgttagctttgctttcatttatgaaagcgtctggactaacatccagacaagttccgaggccaccaccgtcgccatccccggcgatgccgtagctgacggcattacctacggccgaggataacagaggctgctgctaacaaat

SEQ ID NO: 16773 - RNA, 139 nt, Serratia inhibens
  source 1..139: mol_type = other RNA; note = Related to CP015613.1
aatcgttagattttgctttttaattaaagcgtcctttatggacctatcggtaaggccccaccatcgccacctacgatggtgccgtagccgacgacattacgtacggtcgaaaagataacactggctgctactgacgatt

SEQ ID NO: 16774 - RNA, 138 nt, Citrobacter freundii
  source 1..138: mol_type = other RNA; note = Related to CP040698.1
aatcgttagattttgctttttataaaagcgtcctctatggacatatcggcatggccccaccgtcgccaactacgatggtgccgtagccgacgacattacgtacggtcgaaaagataactctggctgctactgacgatt

SEQ ID NO: 16775 - RNA, 138 nt, Escherichia coli
  source 1..138: mol_type = other RNA; note = Related to CP088348.1
aattgtcagtttttgcttttacaaaaaagcgtccactatggacctatcagcgaggccccaccgtcgtcaactacgatggtgccgtagccgacgacattacgtacggtcgaaagatagcagaggctgttgctgacaatt

SEQ ID NO: 16776 - RNA, 154 nt, Pectobacterium versatile
  source 1..154: mol_type = other RNA; note = Related to NZ_CAKLIV010000013.1
atttgtcagcttttgctttcctgaaacctttgggaaagcgtcctataaacggacatatatggaaagcgccaccgtccttgtcaacggccccggtggtgccgtagccaacggcattgcgtgcagttgctatgaacagaagctgttgctgacaagc

SEQ ID NO: 16777 - RNA, 157 nt, Proteus hauseri
  source 1..157: mol_type = other RNA; note = Related to AWXP01000008.1
ttttgttaggtattgctttaaattttatatttagagcgtccaaaatgtttggacatttccgaaggccacgaccatcgcagtcaacggcggtaaagataccgtagcctacggcatattgcacatagccgctatagagtgatggctgatgctaacaaaa

SEQ ID NO: 16778 - RNA, 160 nt, Providencia alcalifaciens
  source 1..160: mol_type = other RNA; note = Related to NZ_OU659150.1
tgctgttagcttatgctttaaatcagatcaggatttggagcgccttattagcataaggcatgttccgtgggctcgaccatcgctggcaacggcgaacacataccgtagccaacggcatattgcatgtggtcgtattgaatggcggctgttgctaacagta

SEQ ID NO: 16779 - RNA, 152 nt, Pantoea agglomerans
  source 1..152: mol_type = other RNA; note = Related to JACYNA010000001.1
agtttttagcttccgctctcgctaaaagtgtgagagcgcctatgcaatgcataggctggaacggaacccccacatagcctggccggcgacgatggggctgtagccgtcctcaattgcgtccggtcagagaataggggcagttgctaagaact

SEQ ID NO: 16780 - RNA, 155 nt, Lelliottia aquatilis
  source 1..155: mol_type = other RNA; note = Related to NZ_JAENMQ010000001.1
gtttcttagcttccgctctcgcagtgtacatgtgagagcgcctgtgcaaacgtacaggctggaacggaacccccacaaagcctggccggcaacgatggggctgtagccgtcctcaattgcgtccggtcaaagaataggggcagttgctaagggct

SEQ ID NO: 16781 - RNA, 155 nt, Klebsiella pneumoniae
  source 1..155: mol_type = other RNA; note = Related to CP043932.1
gtttcttagcttccgctctcgcaacagaaaagtgagagcgcctatgcagtagcataggctggaacggaacccccacaaagcctggccggcaacgatggggctgtagccgtcctcaattgcgtccggtcaaagaataggggcagttgctaagggct

SEQ ID NO: 16782 - RNA, 152 nt, Rahnella perminowiae
  source 1..152: mol_type = other RNA; note = Related to NZ_JAFMOV010000254.1
atctcttagcgtttgctcttatgatttctaatgagagcgtctgtgttaacacagacatgtacggtgctcccacctagcctggtcggcgacgatggggccatagccgtccgcaattgcatccggtcaaggaatagaggcagttgctaagagat

SEQ ID NO: 16783 - RNA, 160 nt, Providencia huaxiensis
  source 1..160: mol_type = other RNA; note = Related to NZ_JAGKOO010000001.1
aattcttagcgtttgctctcatgataattgtaaaatgagagcgtttatgtatacagtacataaacatgttcggtcccccacctagcctggccggcgacggtgaggctgtagccgtccgcaattgcatccggtcaaggaatagaggctgttgctgagaata

SEQ ID NO: 16784 - RNA, 145 nt, Yersinia enterocolitica
  source 1..145: mol_type = other RNA; note = Related to HF933424.1
atcacttagcctttgctcttttaattagagagcgcctgatttattaggctcgatcggagacccccacctagcctggccggcgacgtgggacagtagccgtcggcattacatctggtcaaaggaatagaggctgttgctaagtggg

SEQ ID NO: 16785 - RNA, 147 nt, Yersinia alsatica
  source 1..147: mol_type = other RNA; note = Related to NZ_CABHWQ010000046.1
accacttagcctttgctttccttgttgagggaagcgcctgtttaacaggcttgtacggaggccccccacctagcctgtccggcgacgtggggcagtagccgtcggcattacatccggtcatcggaatagaggcagttgctaagtggg

SEQ ID NO: 16786 - RNA, 151 nt, Yersinia enterocolitica
  source 1..151: mol_type = other RNA; note = Related to CPZT01000016.1
accaactagcttatgctctttttttaatatgaagagcgtctgtgtaaacaggcatgtacgaaggccaccgaccctcgctggcaacgatggggcgctgtagccaacggcattacatccggtcaaacggggatagaggcagttgttaggtggt

SEQ ID NO: 16787 - RNA, 156 nt, Oceanisphaera psychrotolerans
  source 1..156: mol_type = other RNA; note = Related to NZ_MDKE01000022.1
cgtatttgtcttttgctctattttatatagagcgctggagttaaaaaaccagcattgccgaggcctgcaccctatgcgcccctcccggcccttcggaccgagagtagcgaaggacgatgagcttagccagagaaatggtggcagttgacaaatata

SEQ ID NO: 16788 - RNA, 157 nt, Oceanimonas baumannii
  source 1..157: mol_type = other RNA; note = Related to NZ_SODO01000004.1
cgtatttgtcgcctgctctatgttgttagatagagcgctggacgaaagttcagcatgttcctaggctgcaccctatgcgcccctcccggccctccggaccgagagtagcgatagacgatgagcttagccagagaagtggtggctgctgacaaatata

SEQ ID NO: 16789 - RNA, 142 nt, Pseudoalteromonas sp.
  source 1..142: mol_type = other RNA; note = Related to BADY01000010.1
agtgtttggataatgctcttaattgagcgcttaacgttacttgttaagcttgtgcttcggccacaccctccgtctcctcgaaaccaagagtagccgtgaacgataggcttagttatagaaatggtggcagtttccaaatgtt

SEQ ID NO: 16790 - RNA, 137 nt, Colwellia sp.
  source 1..137: mol_type = other RNA; note = Related to JAHKPR010000090.1
aacatttggcttgtatgcctttcacagggcgcctagcaataggcatgtgcttcggccacaccctccgactactcgaaaccaacagtagccgaggacgatgggcttaatcatagaaatggtggctgttaccaaatgtt

SEQ ID NO: 16791 - RNA, 152 nt, Vibrio sp.
  source 1..152: mol_type = other RNA; note = Related to REBK01000001.1
tatgtttacttcatgctctttatttaaagagcgctggactacggttcagcttgtgccaagccgcaccctatgcgctccgctcgccccttcggaccgagagtagcgaaggacgatgggcttagccagaggaatagtggcagttagtaagcgta

SEQ ID NO: 16792 - RNA, 155 nt, Plesiomonas shigelloides
  source 1..155: mol_type = other RNA; note = Related to UGTC01000001.1
tgcactcacttaaagctctcatagattttattgtgagagcgccgaacttttaagtttcggcttgtgcctagccgcacgctaacgcaactccctcgaccgagagtagcgttggacgataagcttagccagagaaatggtggcagttagtgagtgca

SEQ ID NO: 16793 - RNA, 161 nt, Aliivibrio fischeri
  source 1..161: mol_type = other RNA; note = Related to CP000020.2
aatatttgtatattgctcttaattgagcgctgaatagtgaagatctagttacttatcagcttgtgccaaggggcacaccctatgcctgcctcgtcttttgaccgagagtagtcgaggacaataggcttagccaaactaaacggtggctgtttacaaatatt

SEQ ID NO: 16794 - RNA, 157 nt, Vibrio cholerae
  source 1..157: mol_type = other RNA; note = Related to BODJ01000024.1
aatatttgtatattgctcttaatagagcgctgaatagtgaagatttgattacttatcagcttgtgccaagggcacaccctatgcttgcctcggccaaaccgagagtagacgaggacgataggcttagccaaagaaatggtggctgtttacaaatgtt

SEQ ID NO: 16795 - RNA, 147 nt, Vibrio lentus
  source 1..147: mol_type = other RNA; note = Related to MCYK01000079.1
tataactgaactaagctcttagctgagcgctacattaagtagcaggtgccaaggcccacaccctccatttgcctccccctccgcggaccgagagtagagggaggacgctaggtttagccagaagaatagtggcagttttcagttatt

SEQ ID NO: 16796 - RNA, 152 nt, Vibrio parahaemolyticus
  source 1..152: mol_type = other RNA; note = Related to ABGCYW010000004.1
agtgttcggtcttagctctatatggagcgccgtctattttaatagatggtctgtgcggaggcccacaccctccccttggctctcctcggcgcaagcttgagtagaacccgactaggcctgaccttatatattgttggcagtaaccgaacatt

SEQ ID NO: 16797 - RNA, 153 nt, Vibrio diazotrophicus
  source 1..153: mol_type = other RNA; note = Related to NZ_POSL01000026.1
aatgttcggtcttagctcttatggagcgccgtttatctttgataaatggtctgtgcggaggcccacaccctccccttggctctcctcggcgcaagctagagtagaacctgactaggcctgaccttattatactgttggcagtaaccgaacatt

SEQ ID NO: 16798 - RNA, 166 nt, Vibrio navarrensis
  source 1..166: mol_type = other RNA; note = Related to NZ_CP051101.1
gctgtttggtctttgctctttatggagcgctgtttgcattcgtgcagatagtatgtgcggaggccacaccctcgccttggctctccctcggccttacctagagtagagtatcgagagagcctcactaggcctgactttgttatatgactggcagtaaccaaacagt

SEQ ID NO: 16799 - RNA, 155 nt, Shewanella algae
  source 1..155: mol_type = other RNA; note = Related to NZ_CP068230.1
ggtgttcggtcttagctctaatatggagcgccgtctgttgtcaacagatggtatgtgcggaggcccacaccctcccattggttctcctcgtcgcaagctagagtagaacctcattaggcctgaccttaatatattgttggcagtaaccgaacacc

SEQ ID NO: 16800 - RNA, 149 nt, Vibrio fluvialis
  source 1..149: mol_type = other RNA; note = Related to JAHUCR010000005.1
tttggttattattgcctcaattattgaggcgctatcgacacagtcgatggtctgtgcggagggcctcgcaccctcccatcgcttctcctctacctagagtagaacctgctgggcttgatccgaaatttttctggcggatgttaaccaaa

SEQ ID NO: 16801 - RNA, 145 nt, Endozoicomonas acroporae
  source 1..145: mol_type = other RNA; note = Related to NZ_PJPV01000060.1
gatcgtagagatgctcagcgatgagcgctcggaaacgagcttaccgggaaggggcgcacccttcgctgctccttggctcctccggacccggagtagcatcggacgataggcttggccagagagacattggcagatactacagatc

SEQ ID NO: 16802 - RNA, 139 nt, Aeromonas caviae
  source 1..139: mol_type = other RNA; note = Related to NZ_KQ087566.1
cgccaatagtatcagccctgttcacagggcgcctgctttagcaggcttttcgccggctcaccctccgccgtctccaaaagagactgtagcctgcggtaattggcattggttcgaaaagagatggcagaagctattggtt

SEQ ID NO: 16803 - RNA, 146 nt, Aeromonas hydrophila
  source 1..146: mol_type = other RNA; note = Related to VHIX01000003.1
cgccaatagtattagccctgtagacagggcgcctgcttacttagtagcaggctgtttcgccggctcaccctccgccgtctccaaaagagactgtagcctgcggtaattggcataggttcgaaaagagatggcagaagctattggtt

SEQ ID NO: 16804 - RNA, 144 nt, Aeromonas sp.
  source 1..144: mol_type = other RNA; note = Related to CP023817.1
cgccagtagcattagcctttgaaatatagggcgcctgcttagttgcaggctatttcgccggctcaccctccgccgtctccaaaagagactgtagcctgcggtaattggcattggttcgaaaagagatggcagaagctattggtt

SEQ ID NO: 16805 - RNA, 143 nt, Aeromonas veronii
  source 1..143: mol_type = other RNA; note = Related to JAIEYG010000002.1
cgccagtagtattagcccttgcagtttagggcgcctgcataaagcgggctttttcgccggctcaccctccgccgtctccaaaagagactgaagcctgcggtaattggcattggttcgaaaagagatggcagaagctattggtt

SEQ ID NO: 16806 - RNA, 163 nt, Vibrio vulnificus
  source 1..163: mol_type = other RNA; note = Related to NZ_CP019291.1
cctattcagatgtagctctaacgagcgactgattgacgttagtttttcagtctgatgccaaggcctaccgccgccttccgcaagcaagcttgcgaccggcagcagcgttcgcgaggctcactggatcgtcggtttggataaaattaggtagtttctgatttag

SEQ ID NO: 16807 - RNA, 163 nt, Vibrio campbellii
  source 1..163: mol_type = other RNA; note = Related to DS179564.1
ccggttcagatgtagctcttcggagcgactgattaacgtaagtttttcggtctgatgccaaggcctaccgccgccctccgcaagcaagcttgctcccggcagcagcgttcgcgaggctcactggatcgtcgatttgggtaagattaggcagtttctgatttag

SEQ ID NO: 16808 - RNA, 163 nt, Vibrio parahaemolyticus
  source 1..163: mol_type = other RNA; note = Related to JABCGZ010000001.1
cattacagaccatgcctttcataggcggctacctaattaatactaggtagcctgatgccaaggggtaccgccgcctcccgcaagcaagcttgctaccggcagcagcgttcgctatggctcactggattgtcggtttgggtagagataggcagtttctgtttta

SEQ ID NO: 16809 - RNA, 150 nt, Photobacterium damselae
  source 1..150: mol_type = other RNA; note = Related to JADQAO010000002.1
ccatttcagattaagcccgtcatgggcgactatttattaatagtctgatgccaaggggttcaccgccgccgctcgcacgcttgcggcagtagcgttcgcaggcttcactggatagtcggtttggataaaaataggcagtttctgatttag

SEQ ID NO: 16810 - RNA, 130 nt, Acinetobacter sp.
  source 1..130: mol_type = other RNA; note = Related to NZ_VOXY01000007.1
ggtatctatctgctgattttatcagtgctagatttatctagcttgtggggagagggtcggttccgtcctatttgtcccaaataatcctgatagtcgaaggtagtagtttatgtggttatccatagatgcc

SEQ ID NO: 16811 - RNA, 137 nt, Acinetobacter sp.
  source 1..137: mol_type = other RNA; note = Related to NZ_CP067019.1
tatctatttgctgattattcttaattagcgttggggaaacctaacatgtgtggaggggatccgggttccgtcacttcctctgccaagcaagtagctgataagtgaagttaatagttgatttggtttattcttggata

SEQ ID NO: 16812 - RNA, 150 nt, Pseudomonas aeruginosa
  source 1..150: mol_type = other RNA; note = Related to CP061850.1
cccaagttgtttggctgttttttgaacagcgatctgcaggggtgactttgtagatcacgtggggtggcgcggcagagctttcttaggctgtcgatagcgtaatctcggtgattggccgtgctcgtagagtagaggcagtccttctttggg

SEQ ID NO: 16813 - RNA, 152 nt, Pseudomonas oleovorans
  source 1..152: mol_type = other RNA; note = Related to NZ_LR130779.1
cccgagttgtttggctgttgtgattaacagcgatctgaaagggcaacctgacaggtcatgtggggaggcggcggcataacaagctcagtttgccgacagcactatctcggtgattggccgtgctcgtagagtagaggcagaccttcttcggg

SEQ ID NO: 16814 - RNA, 144 nt, Pseudomonas zhaodongensis
  source 1..144: mol_type = other RNA; note = Related to NZ_RFFM01000002.1
aacccgagattttgctagctgttgttaggctagcggtgttgcatgcagcgccacgtgggatggcggccaggcctcagccttggaccgacaatagacccccagtgatcggcctgacttgcagagtgaaggcggctttctttgggt

SEQ ID NO: 16815 - RNA, 188 nt, Vibrio splendidus
  source 1..188: mol_type = other RNA; note = Related to PIFQ01000031.1
ctcaacggtcattactaagatttctgtaaacgtttttattggtctggcaggcattttcgccgaaaactaataggagcatattttatgtctaagttaaatctagatatccgttacacaaactcaaaaaaagacacagaactcacagttggagtcaactatgaatcttctgaagcgcaaaatgaccagag

SEQ ID NO: 16816 - RNA, 188 nt, Vibrio ichthyoenteri
  source 1..188: mol_type = other RNA; note = Related to NZ_AFWF01000003.1
ctcaacggtcattactaagatttctgtaaacgtttttattggtctggcaggcgattacgccaacaactaataggagcaaaaaaaatgtttaaatttaatttacacatccgttacacaaatcaaaaagaaaacacagaactcaatgttgaagccaactatgaatcttctgaattgcaaaatgaccagag

SEQ ID NO: 16817 - RNA, 187 nt, Photobacterium damselae
  source 1..187: mol_type = other RNA; note = Related to NZ_CP035780.1
ctcaacggtcattactaagatttctgtaaacgtttttattggtctggcaggcaatttcgcccacaactaataggaacaaaaaaatggcaaagattaactttcgcatccgttacacaaatcaaaagaaaaacacagaactcgatgttgcagccaactacgaatcttctgaacagcaaagtgaccagag

SEQ ID NO: 16818 - RNA, 187 nt, Shewanella sp.
  source 1..187: mol_type = other RNA; note = Related to MCUF01000038.1
ctcaaaggtcattactaagatttctgtatgcgtttttattggtctggcagacaattcagtcaacaacctataaggacaaaaaaatgtttaaatttaactttaacatgcgttacacaaataaaactgaaaacacagaactcgtggttggagccaattgcgaatcatctgaacagcaagatgaccagag

SEQ ID NO: 16819 - RNA, 186 nt, Pseudoalteromonas sp.
  source 1..186: mol_type = other RNA; note = Related to JACJDR010000003.1
cccaaaggtcattattaagatttctgtaaacgtttttattggtctggcagacaattaagtcaaaactaataaggaacaaaaaatgtataagttaaaactacacattatttacacgaacaaaaatgaaaacacagatattaatattttagtaaatgttgataaatctgaacagcaaaatgaccaggg

SEQ ID NO: 16820 - RNA, 189 nt, Agarivorans aestuarii
  source 1..189: mol_type = other RNA; note = Related to NZ_AP023033.1
ctcaatggtcattatttagatttctggttcaaaacttattggtctggcagggcaatttcgtccacaactaataggagacattaatatgtctaagcttgatttaaatatccgttacacaagccaaaaagaaagcacagagctcactgttgaagccaactatgagtcaactgaaaagcaaaatgaccagag

SEQ ID NO: 16821 - RNA, 181 nt, Shewanella frigidimarina
  source 1..181: mol_type = other RNA; note = Related to JAACRB010000019.1
ctcaacggtcattactaagatttctgttaacgtttttattggtctggcaggcacttcgctaacaacctataaggacaaaatatatgtttatatttaacatgcgttacacaagtaaaagtgaaaacacagagttcgaaattggagtcaattacgaatcctctgagaagcaaaatgaccagag

SEQ ID NO: 16822 - RNA, 191 nt, Aliivibrio wodanis
  source 1..191: mol_type = other RNA; note = Related to LR721750.1
ctcaatggtcattattaagatttctgtatcaaagtttttattggtctggcagggtaatttagcccaacaaccaagaggaaacaaaaaatgaacaaatttcatttcatgatacgttacacaaataaacttaaaaacacagaactcgagattgaagccaattacgaatcttctgaacaacaaaatgaccagag

SEQ ID NO: 16823 - RNA, 187 nt, Photobacterium iliopiscarium
  source 1..187: mol_type = other RNA; note = Related to PYLU01000035.1
ctcaacggtcattaataagatttctgtgaaagatttattggtctggcatggcacttttgcctcaaacccataaggatttcaatatgaaaaagtttacttttacagtacgttactcacaaaaaaataagaacacagaattcaacgttggaatcaatgctgaatattctgaacagcaaaatgacccgag

SEQ ID NO: 16824 - RNA, 198 nt, Plesiomonas shigelloides
  source 1..198: mol_type = other RNA; note = Related to WEJX01000068.1
gctctgtatcatcactagtatttctgccgatgtttacctaatggtctagcagagaagtcaattctggcttccataatccagagggaatagcatatgcgcaagtcaattgtgaaagcacggtatcgcaacaaaaaaaagggcacagagtttacgtttgaagtcagacgtgaaagttctgctaaacgagatgatcagagc

SEQ ID NO: 16825 - RNA, 177 nt, Vibrio splendidus
  source 1..177: mol_type = other RNA; note = Related to LIZL01000063.1
ctcaacggttattactattatttctgcttccaaatattggtctggcgaatttcgttaacaatataaggagtacaagatgaaatttaatttcaaattacgttacgttaaatcaccagaaaacacagaccttgcagttgagttaaacggcgagagttctgatacgcaagataaccagag

SEQ ID NO: 16826 - RNA, 178 nt, Shewanella sp.
  source 1..178: mol_type = other RNA; note = Related to BPET01000001.1
ctcaacggttattacatatatttctgttcctgatattggtctggcgaattatcaccacaatagaaggagacattaaaatgtcatttagttttaaattatgttacgcaaaaacacgtgaaaacacagaccttgcagttgagataaacagtgaggactctgaatcgcaaaataaccagag

SEQ ID NO: 16827 - RNA, 188 nt, Vibrio cholerae
  source 1..188: mol_type = other RNA; note = Related to NZ_JSTD01000043.1
ctcactggctatttatatgtatttctacaagattccttctattggtctggcgaatggttttcattagcaaacaataaggaggtctaaatgaaatcttacttcaaactacgttacagcaaatcaccagaaaacacagagctctctgttgagttaaatagagatgatactgataagcaagatagcccgag

SEQ ID NO: 16828 - RNA, 177 nt, Arsenophonus sp.
  source 1..177: mol_type = other RNA; note = Related to NZ_CP084222.1
ctcagtggtcaattaaattatttctgtggctcttttggttggtctggcgaattttaaaccaacaataaggagatttatgtttatgcgtaagctaacactcaaatataaacgcattacaaagaacactgaatcgatattcgaagccgagtacgagacaaaaacacaagttgaccagag

SEQ ID NO: 16829 - RNA, 183 nt, Vibrio diabolicus
  source 1..183: mol_type = other RNA; note = Related to CP063377.1
ctcaatggtcaataaaattatttctgtggctctctttattttggtctggcgaatcattcaccgccaacaataggaggcactcatgtctaagcgcaagctgaaactcaaatgtaaacacgttacaaagaacaccgagtcgattctcgaagccgagtacgagacggataaacaagttgaccagag

SEQ ID NO: 16830 - RNA, 182 nt, Psychromonas ossibalaenae
  source 1..182: mol_type = other RNA; note = Related to NZ_KB907054.1
ctcaaaggtcaatatatttatttctgtcatttccaacttggtctggcgtgcaaattcgcacatgccatagaaggaaagcaaatggatagttttaatatttcattcaagttagtaaaacacacaaagaactcggacttaaacattgaagccaattttgagtctaaaacgcgagttgaccagag

SEQ ID NO: 16831 - RNA, 189 nt, Colwellia sp.
  source 1..189: mol_type = other RNA; note = Related to JAHKPW010000044.1
gtgacgggttaattaaattatttctggttattccattattggtctggcgcgattaaattcgcttcacttaaataaaggagaacacaatgttaaaatttagtttttacatcagatttacgaataaaacgaagaactttagtttgatatctggaggcagtatcgaatcgaagaagcaagttaaccccgaac

SEQ ID NO: 16832 - RNA, 186 nt, Haliea sp.
  source 1..186: mol_type = other RNA; note = Related to NYUN01000050.1
ctctctctgtgcgtatgctctaataaaagctcaccatttggtctggcacccaattccgggtaactaaatgtggaggtgcaatatgcacattaactttgaaataaacttagctatttgttgtagtaaaaaaagagatgactattccactagagatagtgaactagttcatagacgtaaaggagagag

SEQ ID NO: 16833 - RNA, 163 nt, Pseudoalteromonas sp.
  source 1..163: mol_type = other RNA; note = Related to NZ_CP047240.1
tcaaatggttaattaatttatttctatatttcttccttggtctggcaattttaaccaaaacaggagaagaaaatgctgttaaagctatcttgcaccattaaaaccaatgaaacagagctatccttttttgcagagtttagctcggataagcaagttgacctga

SEQ ID NO: 16834 - RNA, 187 nt, Citrobacter braakii
  source 1..187: mol_type = other RNA; note = Related to CP077405.1
tgtcaggtcgacaatattaccttcatataagttatctcggtctggcggcgtaattttgcgtctaaaatcgagaaatcaactatgtttagtatctctttaaacatgcaagtgacattcaaaaaaacgaagagctcaatttcagagaaaatagatagtcctgaagttgatatgcaagtcgaccaaaaca

SEQ ID NO: 16835 - RNA, 188 nt, Enterobacter hormaechei
  source 1..188: mol_type = other RNA; note = Related to JAHEVB010000007.1
tgtcaggtcgacaatattaccttcataagcgttatctcggtctggcggcgcaatttcgcgtcctaacaatgagacaacatctatgtttactttaactttaaacatgcaagtgacgttcaaaaaaatgaagagctcaacttcagtgaaaaaagacattcctgaagttgatatgcaagtcgaccgaagca

SEQ ID NO: 16836 - RNA, 186 nt, Klebsiella aerogenes
  source 1..186: mol_type = other RNA; note = Related to NZ_CP055904.1
agttaggtcgacaatattaccttcagtgaaaggctcggtctggcggcgcaataagcgtcttaattttcgaggctatgcacatgtttaatattatcttaaatctgcacgtgacatttaacaaagtaaagggctcagtagtaaagaaagtagatgttcctactactgatgagcaagtcgaccgaagca

SEQ ID NO: 16837 - RNA, 188 nt, Lelliottia jeotgali
  source 1..188: mol_type = other RNA; note = Related to CP018628.1
tgttaggtcgataatattaccttcagtaaatttacttggtctggcagtgcaattctgcactataaccaaaaaggtaaatttcatgtttaatttaagcttcaatctgcaagtgacattgattaaaaacgagagctcagtttcaaagaaagtagacgttcctgaaactgaagtgcaagtcgaccgaaaca

SEQ ID NO: 16838 - RNA, 188 nt, Pantoea agglomerans
  source 1..188: mol_type = other RNA; note = Related to JACYNC010000004.1
tgtttaagtcgacataatttaccttatttgacctctggtctggcggcacaattttgtgtcctaaacagagatatcaaagatgaaatttaatttcaaacttaaacttaatatgacatttggttttaaaaagggtatgacattacctaaaacagaatcaagtaatgctcatgagcaagtcgacggaaaca

SEQ ID NO: 16839 - RNA, 187 nt, Mixta calida
  source 1..187: mol_type = other RNA; note = Related to CP026378.1
tgttgaagtcgacatgatttaccttatttgagctctggtctggcagcgtaattatgcgcttcaacggagatatcaaatatgaaattcaatctttcatttaaacttaaaatgacatttggttttaataagagcacggcattacccaaaacagaattaagtaatgtcagtgagcaagtcgacggaaaca

SEQ ID NO: 16840 - RNA, 190 nt, Yersinia aleksiciae
  source 1..190: mol_type = other RNA; note = Related to CGBL01000001.1
tgtaagagtcgatataatttacctgaaaagaacttcggtctggccgtaccagcaggtacgcttaaacgaaggaactttacaatgaagtgtaattatactttcaacctgaaattggcatttggttttaaaaagagctcaactttacctacaaaagaaagtggtaaggtgaatgcgcaagtcgactcaagca

SEQ ID NO: 16841 - RNA, 191 nt, Rahnella sp.
  source 1..191: mol_type = other RNA; note = Related to NZ_MJIB01000008.1
tgtaagggtcgatataattttcctgaacagaacttcggtctggccgtaccgtccggtacgctacgcggagtaatgaaatatgaagaagataaattataccttcaacctgaaattagcatttgatgtaaaaaagaaatataccccacctacactagaaggtggtggggtgaatgtgcaagtcgacccgaaca

SEQ ID NO: 16842 - RNA, 187 nt, Serratia marcescens
  source 1..187: mol_type = other RNA; note = Related to JAFJAP010000008.1
tttttaggtcaatataattatcctgataagaaaatcttggtctggccgcaccaatatcggtgtgaaaccacaggattattcaacatgaaaattgattttaatttccgcttgacattctcaaaaaaagagagctctgtttcaaaccctcgagagaggactgagactagaaagcaaattgacctaaaat

SEQ ID NO: 16843 - RNA, 180 nt, Serratia marcescens
  source 1..180: mol_type = other RNA; note = Related to KI929259.1
tattcaagtcgattattttatcctgatgtggatccttggtctggccgtacatgtgtacgattgaactgggagatacggaaatgtttacattcaaactaaaattgactatcaacaataataagagcttggtgcaaaatcttcgagagaggaattgtacgacaaagcaaattgacttgaatt

SEQ ID NO: 16844 - RNA, 188 nt, Brenneria sp.
  source 1..188: mol_type = other RNA; note = Related to QDKH01000022.1
tgtttgagtcaatatattcgtccacaaatgattgcttcggtctggtgatgcaattttgcatctaagatgaggtaatatcatgaaaaagaagtatagatttaacctgaaattggcatttgatgttgaaaagagcttgactgactccgctagagatagtgatttggttgaaaagcaagttgactcaaaca

SEQ ID NO: 16845 - RNA, 191 nt, Pectobacterium polaris
  source 1..191: mol_type = other RNA; note = Related to NZ_WUBF01000012.1
tgtttgagtcaatataatttatccacctatgattacttcggtctggtgatgcaattttgcatctataagaggaagtaatattatgaaaaagaaatacaagttaaacctgtcgttggcatttgattttgaaaagaacttgaccatttctgctagagatagtgatttggttgaaaagcaagttgactcaaaca

SEQ ID NO: 16846 - RNA, 180 nt, Aeromonas media
  source 1..180: mol_type = other RNA; note = Related to NZ_UETL01000014.1
ccctagagccaattatatattccggtcaatcccccttggtctggcagtcaacacgccgtgttggctttaacctggaggaattgaaaatgagtaaacgtaagaagaagtgtgttggtaagaacgctacgcgctcacgtcgagagaatgagcgtaagttactgcaacaagttggttctagag

SEQ ID NO: 16847 - RNA, 180 nt, Aeromonas jandaei
  source 1..180: mol_type = other RNA; note = Related to AP024466.1
ccctagagtcaattaaatattccagttaaagcccccttggtctggcagttggcacatcccgtgctgacgttaacctggaggtttaaatgagtaaacgtaagaaaaagtgtgttggtaagaacgctaagcgctcacatcgagagaatgagcgtaagttactgcaacaagttgattctagag

SEQ ID NO: 16848 - RNA, 196 nt, Marinobacter nauticus
  source 1..196: mol_type = other RNA; note = Related to RBJB01000003.1
tacccgaagtcaatcatttaattcctgttccgttgaagtttggtctggcgctctacgtgagcataaacctactaaaatacggaggaccttatggtctatttaaagctagaagtgcaagtatcaatcagtggtaacgagaacggtcctgacctgactgagaagaaagggaaggatgaaatgcaagttgactcgggta

SEQ ID NO: 16849 - RNA, 198 nt, Marinobacter changyiensis
  source 1..198: mol_type = other RNA; note = Related to NZ_VZZZ01000001.1
tactcgtagtcaatgtatatattcctgtttcggggaagtttggtctggcgctcctaggagcctaaatccattaacttaaccggaggatccacatggatcatttcaaaatagaaatacaggtaacattcgtaaacaaagagaacgcatccaagctgaatgagaatgatgctaagggtgtgaaacaagttgactcgagta

SEQ ID NO: 16850 - RNA, 196 nt, Pokkaliibacter plantistimulans
  source 1..196: mol_type = other RNA; note = Related to NZ_LAPT01000169.1
tactcaaggtcaattatttttttaatccctgaatgctttggaacgtggtctggagccctacttttggggccataactaacgcagaaggagcatgttatgaatatttctattcgtatttctatcgtaaaattgaacaagggcaaatccaatccaaccgagagggaggtgcggattaaaaagcaaattgacctgagta

SEQ ID NO: 16851 - RNA, 196 nt, Pseudomonas sp.
  source 1..196: mol_type = other RNA; note = Related to CP033104.1
cacttgagctaatagtaatattccttgactgcttactccacttggtctggccacagatgcgaatttctcgcttctgcatgctgagaggataaagcgatgttttacatgaaacctgatgtacctgtgactgttccaaaagagagcgttcccgaagtgcctagagatagtcctttgtggaaaagagttggctcaagtg

SEQ ID NO: 16852 - RNA, 195 nt, Pseudomonas monteilii
  source 1..195: mol_type = other RNA; note = Related to JAEHTA010000001.1
cactaaagccaatattactattccttgattgcttactccgattggtctggccgacgggggcgaattttcgtccccgcatacctgaggatgtagcgatgcttaacgcaaaaccagctgtacctgtgactgttaaacaaaagggcgttcccgaagtgactagagatagtcctctgtggaaaagaattggctctagtg

SEQ ID NO: 16853 - RNA, 196 nt, Pseudomonas xanthosomae
  source 1..196: mol_type = other RNA; note = Related to NZ_CP077075.1
cgcttgagtccaatattaatattccttgaatgcttaatccgcttggtctggccacaagagcatttcgctcttggttgctaagaggaaaaagctatgcgtaaagctaaatcagatgtacctgtgactgttacagaaaaagagagcattccggaagtaactagagatagttctccttggaaaaaaattggctcaagtg

SEQ ID NO: 16854 - RNA, 197 nt, Pseudomonas viridiflava
  source 1..197: mol_type = other RNA; note = Related to NZ_UWAB01000407.1
cattcaagtcaatattaatattccctgatctgcttgatccaattggtctggcgtcggaggtgaattcctcgccttcgcgtgctgaaaggaaaaagcgatgcttcaaatcaaaatcgttgtacttgtgactggtaacaaagagagcgttcgtggggtgcctagagatagtccctcgcggaaaagaattgactcgaatg

SEQ ID NO: 16855 - RNA, 196 nt, Pseudomonas syringae
  source 1..196: mol_type = other RNA; note = Related to AE016853.1
catttgagtcaatacaaatattccttgagatgcttaatccaattggtctggccgtgacgacagaattctctgtcttcacaacaagagggtttcgcaatgttcgatgttaaaattgaaatacatatggctggtagaaagaagagcattcccgtagtagctagagatagcacatcggggaaaagaattggctcaaatg

SEQ ID NO: 16856 - RNA, 190 nt, Pseudomonas aeruginosa
  source 1..190: mol_type = other RNA; note = Related to CP054472.1
cacttgagctgataatattattccttgcttattttctcttggtctggcggaggggtaattccgccccttcatagcctggagtgaatagaaatgatatttttcaatatcaacatatacgtgactagtaaagaaaagagcattcgctcagaagctagagatagctctgttgtgaaagggattagctcaggtg

SEQ ID NO: 16857 - RNA, 190 nt, Pseudomonas sp.
  source 1..190: mol_type = other RNA; note = Related to JAHUVZ010000002.1
cacctgagctgataatattattccttggttatatttctcttggtctggcggagaggtaatttcgcctcttcaaaacctggagtaaatagaatgatattttttaatatcaacatatacgtgactagtaaagaaaagagcattcgtgcggaagttagagatagctccgttacgaaagggattagctcaggtg

SEQ ID NO: 16858 - RNA, 192 nt, Pseudomonas stutzeri
  source 1..192: mol_type = other RNA; note = Related to NC_018028.1
cacctgagataataatattgttccttgtttgatttctcttggtctggcgacagtcgacattccgccggctgcaaatcaagaggttttaaaagatgatatatttcaatatcaacgtatatgtgacttacgagaaaaagagcattcttccgaaaaccagagatggttccggtgagaaaagggttatctcaggtg

SEQ ID NO: 16859 - RNA, 190 nt, Pseudomonas taiwanensis
  source 1..190: mol_type = other RNA; note = Related to QJRF01000029.1
cacctgaattaataatattgttccttgtgctcaaactcttggtctggcgacagataacacccgttatctgcatatcaggaggactgaagaatgattttcttcaacatcgtaataaacgtgactggttgttctaagagcgttcgttcggaagtgggagaccgccccgatacggaaagggttagttcaggtg

SEQ ID NO: 16860 - RNA, 193 nt, Pseudomonas punonensis
  source 1..193: mol_type = other RNA; note = Related to NZ_FRBQ01000013.1
cacctgagttaataatattgttccttgtgcttcaactcttggtctggcgacaggtgacaatcgtcacttgcatatcgagagggtaataagatgatagttgtcaatgtcgtcatcaacgtgactggttgtaaaaaagagagcattcgcccggaagtgggagaccgccccgaagcgaaaagggttaattcaggtg

SEQ ID NO: 16861 - RNA, 197 nt, Pseudomonas lactis
  source 1..197: mol_type = other RNA; note = Related to QTSW01000011.1
catctaaaccaatattaatattctttgtgctaaagctcttccttggtctggctacaggtatgcattccgcaaacctgattgcaaggagaactaaccgatgattatcatcagtgttaatgtgcgcgtgactggtaaaaaaaagagcattcctaagaactccagagatggggtcggtcggaaaaaaattggtttagatg

SEQ ID NO: 16862 - RNA, 195 nt, Pseudomonas migulae
  source 1..195: mol_type = other RNA; note = Related to NZ_CP043571.1
catctgaaccaatattaatattctttgtgcttaaattcttccttggtctggctacaggtaggcattccgtttacctgctgcaaggagaaaacttgatgatcttcatcaatgtaaacatcaccgtgactggtaaaaatgagagcattccttcgaagtccagagatggggtcggtgggaaaaaaattggttcggatg

SEQ ID NO: 16863 - RNA, 193 nt, Pseudomonas aeruginosa
  source 1..193: mol_type = other RNA; note = Related to CP073082.1
cacctagttcaatattaatatcccttgtctccggcggaattggtctggcgcgtcctagtggcgcatatatcaattacttaaggagttataacgatgtatattctggttgttgtaaaattttctaagaaagtaaagagcactcagccggttggtggagacactactggattgggcaaaaaaattgtactaggtg

SEQ ID NO: 16864 - RNA, 191 nt, Pseudomonas sp.
  source 1..191: mol_type = other RNA; note = Related to NZ_CP027733.1
ctcttaagtcaatatacatattccttgctgtttctctctttggtctggccggacatcgcacttttgcgttgttcattcgaggagaaaagcgatgtataaactacatgttgtaatctacgtgactagaaaaaataagagcattcgtacgaagcttggagacaggctcgcaacgaaaggaattgacttaagag

SEQ ID NO: 16865 - RNA, 204 nt, Alcanivorax xenomutans
  source 1..204: mol_type = other RNA; note = Related to NZ_OBMO01000006.1
tatctagcactagtaagaatattccttctgatcactccttggtctggcggtggtgcaattcagcatcatcacaactaaaaaggagaactcgaatgcatttattaatgtatttcaaaattaagatcagcctaacgttttgtaaaaagagctcgagcgaccatcccttagaagggtggccagctgacaagcaaactatgctagata

SEQ ID NO: 16866 - RNA, 185 nt, Crenothrix polyspora
  source 1..185: mol_type = other RNA; note = Related to NZ_FUKJ01000432.1
ccatataatcaatatttatattctcgcgttccttttgttggtctggcgtggcgtttgccacaattaacttcaatcgaggaaacaaatgcaaaataatattcatattaccgtagtaattaaagcaactgagagcaacgatttgcaacagccccacgctgtacaagttgaaaaacaagttgattcgg

SEQ ID NO: 16867 - RNA, 190 nt, Methylobacter sp.
  source 1..190: mol_type = other RNA; note = Related to PERX01000093.1
caaaataatcaatccttatattctcgtctcctaagttattggtctggcgtggcatagccacaaatccccttaacagaataaaggtaaacaaatgaacactgatattaaaatcaccgtagtaatcaaaaaaaccgagagcaacgatttacaacagccccaagctgttaaagtcgaaagacaagttgatttg

SEQ ID NO: 16868 - RNA, 177 nt, Methylomonas sp.
  source 1..177: mol_type = other RNA; note = Related to NZ_CP014360.1
ccaaataatcaatctcaatattctcgtttccttagttattggtctggcattttttaaccctaaccaaggagatagcaatgaaatgtgacattcacattaacgtagtaattaatgaagtcaagagtataagtttgcaacagccccacgctttgcaaacgaaacaacaagttgatttgg

SEQ ID NO: 16869 - RNA, 175 nt, unidentified
  source 1..175: mol_type = other RNA; note = Related to JACYUQ010000012.1; note = Oxalobacteraceae bacterium
tgtccatccaatagttgtatccccatttctccgaagcttggtctggcccatttcaaccagcaaaggagtaataacatgaaccatcgttataaaatgacgttctcatttgagaaaaaaagcagtaaagacaatcggagcggttcggttgaaactgacctgcgagttggatcggaca

SEQ ID NO: 16870 - RNA, 213 nt, Thioalkalivibrio sp.
  source 1..213: mol_type = other RNA; note = Related to NZ_AQXY01000025.1
tgcctgattccaatacaccaattcccgatgctctgaatgtttggtctggcgctaaacgaaatccgtcgtttagccaaaaacataaggagtaacaaatgaaacgagcaatcgtgcatgtgtcagtgaccgtcctttttcgacaagaggacacagatagcgcggaacgtaccgctcgagagagccacgattccgaaacgcaggttggatcaggca

SEQ ID NO: 16871 - RNA, 171 nt, Escherichia coli
  source 1..171: mol_type = other RNA; note = Related to NZ_CP050193.1
ccaaagagccaatagagtttttccttgctttcctactggtctggcaaaatttcataaccaataggagttgcatcatgtttattatcaacatcaacattaacgtaaccaagagctcttcatcttgttctggagacggtcagatgaagaaaaaaagagaggttggctctctgg

SEQ ID NO: 16872 - RNA, 147 nt, Klebsiella pneumoniae
  source 1..147: mol_type = other RNA; note = Related to CP068315.1
accaatttttccttgctttcctatggtctggcaaaatttcacaaccactaggagcagtactatgtttattttcaacatcaacatttacgtaaccaagagctcttcatcttgttccggagacggacagaagaagaaaaaaagagaggt

SEQ ID NO: 16873 - RNA, 172 nt, Escherichia coli
  source 1..172: mol_type = other RNA; note = Related to DADHSI010000124.1
cctaagcgctgatagatttattcctttggttttccctggtctgacagaaatcaaaccaaaacggagaaacaaagtatgtttaacatcaacatcaatatcactgtgattaagagcgcttcaactaaatctggagacagaaagaagaagcaaaagaaagagatcggcgctaagg

SEQ ID NO: 16874 - RNA, 173 nt, Hafnia paralvei
  source 1..173: mol_type = other RNA; note = Related to NZ_CP083739.1
ccctaaagccaattgatttattccttgtgttccttactggtctggcaaaacccataacccaagaaggaaggcaaaaatgttaaattttaacatcaacttaagtgtaactaagacctataactatgcatctggagacagtcatagtcgtagaaaagaagggattggctttatgg

SEQ ID NO: 16875 - RNA, 177 nt, Shigella sp.
  source 1..177: mol_type = other RNA; note = Related to MECU01000027.1
ccctaaagccaattgatttattccttgtgttccttactggtctggcaaaacccaacaaccaaagaaggaagactagaatgtttaaatttaacatcaacttaagtgtaattaataagacctacaattacggaactggagacagtagtagtcgtagaaaaaaagggattggctttatgg

SEQ ID NO: 16876 - RNA, 170 nt, Leclercia adecarboxylata
  source 1..170: mol_type = other RNA; note = Related to NZ_WVWD01000013.1
cccattagccaatagatgtgttccttgtcttctttcactggtcaggcaaaatttatctaaccatggagaagaaaaaatgatttcaatcaacttgaatatcaacgtgactaagagctattactcattttctggagacagaaagagtaagaaaaaagagattggcttgatgg

SEQ ID NO: 16877 - RNA, 164 nt, unidentified
  source 1..164: mol_type = other RNA; note = Related to JAGNRY010000075.1; note = Paludibacteraceae bacterium
tatagctaacaacacaattccttgttccataacggtcaggcaaaacttaaccaaccgagaggaaccaagcatgtttaatttaaatattagtatctgcagcattagtgtgacaaagagccattaccagacaactggagacagtactggtaaaattgatagcaata

SEQ ID NO: 16878 - RNA, 183 nt, Morganella morganii
  source 1..183: mol_type = other RNA; note = Related to CP066129.1
ccttgagtcaataatatatcccttgttccattacggtcaggcaagttatcaacaaccgaaaaggaacaaatatgtttaatttaacaattagcattagtattaaaagcattaccatgacgaagagctactgccaaccttctggagacagagatggtagtattaacaaagggattggcttcaagg

SEQ ID NO: 16879 - RNA, 176 nt, Pseudomonas viridiflava
  source 1..176: mol_type = other RNA; note = Related to NZ_UUIA01000028.1
ccctcagattgatagatttattccttgtcttctttatggtctggcaaaactcaaccagcaaggagatgaaccgatgatttttctcatcgtagtaaatgtaaacgtgaatggcggtacaaagagcaaagagtctgatactggagacagtcagcctctgaaaaggattgatctgaggg

SEQ ID NO: 16880 - RNA, 196 nt, Chromohalobacter marismortui
  source 1..196: mol_type = other RNA; note = Related to NZ_SOBR01000014.1
tccctattccaacatttatttctttgcaaagcacaaccattggtctggcaactctagccataggggttagggggtgacaatgggagtaatgtaatgaagctaaaactaagctttaatgtgcgtctaaacattagctgtaaagagcctgcgaaatcatctagagatagaacttcgcaggaaggagttggaataggtg

SEQ ID NO: 16881 - RNA, 198 nt, Halomonas sp.
  source 1..198: mol_type = other RNA; note = Related to NZ_NSKA01000004.1
tagttattccaatatttttttctttgtcacgcattaccactggtctggcaatcctgtcctaatcctgggacgggtagacaagaggtaagaagatgaaattcaacatgaatcttaacttgcgtttcagcatgggcagcaagaaagagtctcgaaagaaacctagagataggtcttttgaggaaggggttggaatagcta

SEQ ID NO: 16882 - RNA, 195 nt, Halomonas sp.
  source 1..195: mol_type = other RNA; note = Related to CP040452.1
tccttaatccagtactattattctttgcattgcgcacctattggtctggcagatccctgtccatcgactgggacaaaccaagaggtatcatgatgaaaattttagtaatcattaaattgcgcaaaagcattagttgtaaagagtctgcctgcgtttctagagataggagtaggcaggaaggaactggattaggtg

SEQ ID NO: 16883 - RNA, 195 nt, Halomonas sp.
  source 1..195: mol_type = other RNA; note = Related to JABFTW010000016.1
ctcacatccaacattcaattctttgcgcgtgtggaaaacctcggtctggccggtcaaccatgtcggttggctgtaacctgaggagtattacgatgaaaatcgaaaataccactgttatccgcatcagtaatagctgcaaagagtttggttcttcacctagagataggcagaaccaagaaggagttggagtgagag

SEQ ID NO: 16884 - RNA, 218 nt, Comamonas testosteroni
  source 1..218: mol_type = other RNA; note = Related to NZ_CP043568.1
gtcagttgctagttgttattctcttggagccgattgagtgttgtgcggcgcattaattttgatgcgccataactcatgaggtaccaaaatgggaaatacccaaacgcaaaactgttcaaaaatcgaaatcattaatagcaatattaatgtgaacgtaacggtaaaagtgatttacgtgcgagagcaggtaaatcataaaagcagcgctcgcagctggc

SEQ ID NO: 16885 - RNA, 192 nt, Cupriavidus necator
  source 1..192: mol_type = other RNA; note = Related to CP074381.1
tgccggcgcgggttatttgctctctttcgtgactcgtttaggtgtaggcggatttgcttgcaaatctataaccgaaaacgaggtatcacatgacaaatattgttgtaaacgtaaccactattgttgttcagaactcagttgtgagtggtcgggaggccgccattcgcaatgataagcccgccagcgtcggca

SEQ ID NO: 16886 - RNA, 153 nt, Vibrio parahaemolyticus
  source 1..153: mol_type = other RNA; note = Related to KK081893.1
actctttagcttaggactatttagtctagtcgggtgtttagccagactctaatttattgaacgggtttatggttgcgataggttcgcaacctgatctcctcactacgttcgtcaatcaggttgcgaacctatcgcttcctctagtaaagagtt

SEQ ID NO: 16887 - RNA, 153 nt, Aeromonas caviae
  source 1..153: mol_type = other RNA; note = Related to NZ_JTBG02000005.1
gctctttagcttaggacaaatttgtctagtcgggtgtttagccagactctaatttattgaacggttttatggttgcgataggttcgcaaccagatctcctcactccgttcgtcaatctggttgcgaacctatcgcttcctctagtaaagagtt

SEQ ID NO: 16888 - RNA, 153 nt, Vibrio vulnificus
  source 1..153: mol_type = other RNA; note = Related to AAXMWT010000001.1
actctttagcttaggacgaattcgtctagtcgggtgtttagccagactctaatttattgaacggttttatggttgcgataggttcgcaaccagatctcctcactccgttcgtcaatctggttgcgaacctatcgcttcctctagtaaagagtt

SEQ ID NO: 16889 - RNA, 153 nt, Photobacterium damselae
  source 1..153: mol_type = other RNA; note = Related to PZOH01000095.1
gctctttagcttcggacgaattcgtctagtcgggtgtttagccagactctaacttattgaacggttttatggttgcgataggttcgcaaccagatcttctcactccgttcggcaatctggttgcgaacctatcgcttcctttagtaaagagtt

SEQ ID NO: 16890 - RNA, 153 nt, Vibrio pectenicida
  source 1..153: mol_type = other RNA; note = Related to NZ_RSFA01000069.1
gctctttagcttaggacgaattcgtctagtcgggtgtttagccagactctaatttattgaacggttttatggttgcgataggttcgcaacctgatctcctcactccgttcgtcaatcaggttgcgaacctatcgcttcctctagtaaagagtt

SEQ ID NO: 16891 - RNA, 153 nt, Photobacterium phosphoreum
  source 1..153: mol_type = other RNA; note = Related to WMCU01000006.1
gctctttagcttaggacgaattcgtctagtcgggtgtttagccagactctaatttattgaacggtgttatggttgcgataagttcgcaacctgatctcctcactccgttcgtcagtcaggttgcgaacttatcgcttcctctagtaaagagtt

SEQ ID NO: 16892 - RNA, 145 nt, Aliivibrio fischeri
  source 1..145: mol_type = other RNA; note = Related to WOBA01000001.1
actctttagcttaggacgaattcgtctagtcgggtgtttagccagactctaatttattgaacggcattatggttgcgataggtccgcaacctgatctcgttcctcaatcaggttgcgaacctatcgcttcctctagtaaagagct

SEQ ID NO: 16893 - RNA, 153 nt, Vibrio fluvialis; identical to SEQ ID NO: 16890
  source 1..153: mol_type = other RNA; note = Related to NZ_CP051108.1

SEQ ID NO: 16894 - RNA, 153 nt, Salinivibrio costicola
  source 1..153: mol_type = other RNA; note = Related to NZ_MUFR01000019.1
gctctttagcttaggacgaatccgtctagtcgggtgtttagccagactctaatttattgaacggttttatggttgcgataggttcgcaacctgatctcctcactccgttcgtcaatcaggttgcgaacctatcgcttcctctagtaaagagtt

SEQ ID NO: 16895 - RNA, 153 nt, Pseudoalteromonas sp.
  source 1..153: mol_type = other RNA; note = Related to JAKRFY010000043.1
gctctttagctcaggacgaatacgtctagtcgggtgtttagccagactctaatttattgaacggttttatggttgcgataggttcgcaacctgatctcctcactccgttcgtcaatcaggttgcgaatctatcgcttcctctagtaaagagtt

SEQ ID NO: 16896 - RNA, 153 nt, Marinomonas gallaica
  source 1..153: mol_type = other RNA; note = Related to NZ_FLRB01000014.1
gctctttagcttaggacgaatacgtctagtcgggtgtttagccagactctaatttattgaacggttttatggttgcgataggttcgcaacctgatctcctcactccgttcgtcaatcaggttgcgaacctatcgcttcctctagtaaagagta

SEQ ID NO: 16897 - RNA, 146 nt, unidentified
  source 1..146: mol_type = other RNA; note = Related to JABSRB010000040.1; note = Oceanospirillaceae bacterium
actctttagcttaggacgaattcgtctagtcgggtgtttagccagactctaatttattgaacggctttatggttgcgataagatcgcaacctgatctcgtacctcaatcaggttgcgatcttatcgcttcctcttagtaaagggtt

SEQ ID NO: 16898 - RNA, 145 nt, Pseudomonas anguilliseptica
  source 1..145: mol_type = other RNA; note = Related to NZ_JAEIOI010000003.1
gctctttagcttaggacgaactcgtctagtcgggtgtttagccagactctaagttattgaacgagattgtggttgcgatagtctcgcaacctgatttcgttcctcaatcaggttgcgagactatcgcttcctctagtaaagagtt

SEQ ID NO: 16899 - RNA, 145 nt, Pseudomonas punonensis
  source 1..145: mol_type = other RNA; note = Related to NZ_FRBQ01000002.1
gctctttagcttaagacgaatccgtctagtcgggtgtttagccagactctaagttattgaacgacattgtggttgcgatagtctcgcaacctgatctcgttcctcaatcaggttgcgagactatcgcttcctctagtaaagagtt

SEQ ID NO: 16900 - RNA, 145 nt, Pseudomonas sp.
  source 1..145: mol_type = other RNA; note = Related to NZ_JACKQK010000005.1
gctctttagcttaagacgattccgtctagtcgggtgtttagccagactctaagttattgaacgattttgtggttgcgatagtctcgcaacctgatctcgttcctcaatcaggttgcgagactatcgcatcctctagtaaagagct

SEQ ID NO: 16901 - RNA, 146 nt, Moritella viscosa
  source 1..146: mol_type = other RNA; note = Related to NZ_FRDS01000164.1
gctctttagcttaagacgaatttcgtctagtcgggtgtttagccagactctaatttattgaacgacattatggttgcgatatgttcgcaaccagatctcgtacctcaatcaggttgcgaacatatcgcttcctctagtagagagca

SEQ ID NO: 16902 - RNA, 146 nt, Pseudoalteromonas maricaloris
  source 1..146: mol_type = other RNA; note = Related to NZ_WEIA01000002.1
gctctttagcttaggacgaaattcgtctagtcgggtgtttagccagactctaatttattgaacgactttatggttgcgatatgttcgcaaccgtcattcgttcctcatgaaggttgcgaacatatcgcttcctctagtaaagagca

SEQ ID NO: 16903 - RNA, 146 nt, Rheinheimera sp.
  source 1..146: mol_type = other RNA; note = Related to JAERPS020000004.1
gctctttagcttaggacgacattcgtctagtcgggtgtttagccagactctaatttattgaacgactttatggttgcgatatgttcgcaaccgtctttcgttcctcaagaaggttgcgaacatatcgcttcctctagtaaagagca

SEQ ID NO: 16904 - RNA, 147 nt, Marinomonas agarivorans
  source 1..147: mol_type = other RNA; note = Related to NHNK02000003.1
tctctttagttttagggcgaaattcgtctagtcgggtgtttagccagactctaacttattgaacgactttatggttgcgatatgtgcgcaaccattactcgttcctcatgatggttgcgcacatatcgcggcctctagtaaagagct

SEQ ID NO: 16905 - RNA, 142 nt, Oleispira sp.
  source 1..142: mol_type = other RNA; note = Related to JAESQF010000097.1
actctttagctttggacgaatttgtctagtcgggtgtttagccagactctaatttattgaacggttttgtattgcgagacatcgcgatctaagctcgttcctcacttagatcgcgatgcctcgcgatcttgagtaaagagta

SEQ ID NO: 16906 - RNA, 146 nt, Marinospirillum minutulum
  source 1..146: mol_type = other RNA; note = Related to NZ_AULO01000011.1
actctttagaactaggacgaattcgtctagtcgggtgtttagccagactctaacttattgaacgggtttatgcttgcggtgtttccgcaaccttaactcgttcctcattaaggttgcggaaacaccgcttcctctagtaaagagca

SEQ ID NO: 16907 - RNA, 151 nt, unidentified
  source 1..151: mol_type = other RNA; note = Related to NZ_RPGH01000128.1; note = Candidatus Enterovibrio escacola
gctctttagcgttggacgatattcgtattcgtctagtcgggtgctcagccagactctaacttattgaacgacttgacggtgcgatatgttcgcaaccttcactcgttcctcatgaagcttgcgaacatatcgcattctctagtaaagggct

SEQ ID NO: 16908 - RNA, 143 nt, Chromobacterium subtsugae
  source 1..143: mol_type = other RNA; note = Related to JAHDTB010000015.1
gctctctagcttaggactctatgtccagtcgggtgtttagccagactctaatttattgaacggtttggggttgcgaaagactcgcatcctaaactcgttcctcatttaggatgcgagtctttcgcttcctctagtagagagtg

SEQ ID NO: 16909 - RNA, 145 nt, Paenalcaligenes hominis
  source 1..145: mol_type = other RNA; note = Related to NZ_CP019697.1
actctttagcgtatgacggattacgtcagtcgggtgtttagccagactcaaatttattgaacggttttggggttgcgctaggcgcacaaccttaactcgttcctcattaaggttgtgcgcctagcgcttcctttagtaaagagta

SEQ ID NO: 16910 - RNA, 144 nt, Oligella ureolytica
  source 1..144: mol_type = other RNA; note = Related to CP065725.1
actctttagcgtatgacggaatacgtcagtcgggtgattagccagactcaaattgattgaacgggtttaaagttgcgtgatgtacgctttcttagctcgttcctcgccaagaaagcgtacatcacgctctttcaagtaaagagt

SEQ ID NO: 16911 - RNA, 145 nt, Aeromonas enteropelogenes
  source 1..145: mol_type = other RNA; note = Related to NZ_CP083625.1
gctctttagcgttggacggttacgtctagtcgggtgcttagccagactctaagttattgaacggcattatggttgcgatagtctcgccacctaatctcgttcctcgtttaggtggcgagactatcgcttcctctagtaaagagct

SEQ ID NO: 16912 - RNA, 96 nt, Xenorhabdus bovienii
  source 1..96: mol_type = other RNA; note = Related to FO818637.1
gctctttagcggtttggacaaacttcgtctagtcgggtgattagccagactctaacttattgaacacgtttaattcgctgtctttagtaaagagta

SEQ ID NO: 16913 - RNA, 101 nt, unidentified
  source 1..101: mol_type = other RNA; note = Related to CACVAY010000001.1; note = Thiotrichaceae bacterium
attgaacggctttagggtgcgatgttttcgcattctaagctcgtcagcttgttgcttcctcccttagaatgcaaaaacatcgcagtctttagtaaagagcc

SEQ ID NO: 16914 - RNA, 145 nt, Vibrio alginolyticus
  source 1..145: mol_type = other RNA; note = Related to AAXMUQ010000002.1
actctttagtgttggacgcaaattcgtctagtcgggtgattagccagactcaaatttattgaacgggtttaaatgcgaggtgtacgcatcctaaactcgttcctcctttaggatgcgtacacctcgcaccttctagtaaagagcc

SEQ ID NO: 16915 - RNA, 144 nt, Vibrio sp.
  source 1..144: mol_type = other RNA; note = Related to NZ_CP022741.1
actctttagtgtaagacgtaattcgtctagtcgggtgattagccagactcaaatttattgaacaggtttaaatgcgaggtgtacgcatcctaaactcgttcctcctttaggatgcgtacacctcgcactctttagtaaagagtt

SEQ ID NO: 16916 - RNA, 107 nt, Chromobacterium haemolyticum
  source 1..107: mol_type = other RNA; note = Related to NZ_MUKV01000069.1
actctttagtgtaggacggtcatcgtctagtcgggtgtttagccagactctaacttattgagcggatttatggttgcgataggatcgcatcctcctagtaaagagcc

SEQ ID NO: 16917 - RNA, 155 nt, unidentified
  source 1..155: mol_type = other RNA; note = Related to PBYJ01000041.1; note = Oceanospirillaceae bacterium
gctctttagcgttggactgcttaagtctagtcgggtgattagccagactctaacttattgaacgggtttagggttgcgaaatgaacgcagcgcagcctaaacctgttcggtttaggctgcgctgcgttcatttcgcggcctcttagtgaagagct

SEQ ID NO: 16918 - RNA, 155 nt, Marinobacterium stanieri
  source 1..155: mol_type = other RNA; note = Related to NZ_FTMN01000018.1
gctctttagtgttggactgtacaagtctagtcgggtgattagccagactctaacttattgaacgggtttagggttgcgaaatgaacgcagcgcagcctaaacctgttcggtttaggctgcgctgcgttcatttcgcggcctcttagtaaagagcg

SEQ ID NO: 16919 - RNA, 146 nt, Photorhabdus khanii
  source 1..146: mol_type = other RNA; note = Related to NZ_WHZZ01000002.1
actctttagcgttggacgtattacgtctagtcgggtgattagccagactctaacttattgaacgtatttagggttgcgaaagtgtcgcacccctcactcgttcctccttcgggttgcgacactttcgcttcctctagtaaagagtt

SEQ ID NO: 16920 - RNA, 146 nt, Pantoea coffeiphila
  source 1..146: mol_type = other RNA; note = Related to NZ_JAFBFW010000005.1
actctttagcgttggacgtattacgtctagtcgggtgattagccagactctaacttattgaacgtatttggggttgcgaaagtgtcgcaaccctcactcgttcctccttcgggttgcgacactttcgcttcctttagtaaagagtt

SEQ ID NO: 16921 - RNA, 145 nt, Erwinia sp.
  source 1..145: mol_type = other RNA; note = Related to NZ_LMLK01000022.1
actctttagcgtggacgtattacgtctagtcgggtgattagccagactctaacttattgaacgcatttggggttgcgaaagtgtcgcacccctcactcgttcctccctcgggttgcgacactttcgcttcctccagtaaagagtt

SEQ ID NO: 16922 - RNA, 146 nt, Klebsiella variicola
  source 1..146: mol_type = other RNA; note = Related to DAFWUX010000006.1
actctttagcgttggacggctttcgtctagtcgggtgtttagccagactctaatttattgagcgtatttggggttgcgaaagtgtcgcacccctcgctcgttcctccctcgggttgcgacactttcgcttcctccagtaaagagtt

SEQ ID NO: 16923 - RNA, 146 nt, Citrobacter koseri
  source 1..146: mol_type = other RNA; note = Related to UFVV01000001.1
actctttagcgttgggcgttttacgtctagtcgggtgattagccagactctaacttattgagcgaatttggggttgcgaaagtgtcgcccccctcactcgttcctccctcgggttgcgacactttcgcttcctccagtaaagagtg

SEQ ID NO: 16924 - RNA, 146 nt, Photorhabdus bodei
  source 1..146: mol_type = other RNA; note = Related to NSCM01000023.1
actctttagcgttggacgtcttacgtctagtcgggtgattagccagactctaacttattgaacgcattaagggttgcgaaagtgtcgcaacctgaactcgttcctccttcaggttgcgacactttcgcttcctccagtaaagagcc

SEQ ID NO: 16925 - RNA, 145 nt, Photorhabdus luminescens
  source 1..145: mol_type = other RNA; note = Related to NZ_JXSK01000003.1
actctttagcgttggacgtttacgtctagtcgggtgattagccagactctaacttattgaacgcattaagggttgcgaaagtgtcgcaaccctctctcgttcctccctcgggttgcgacactttcgcttcctctagtaaagagtc

SEQ ID NO: 16926 - RNA, 145 nt, Citrobacter freundii
  source 1..145: mol_type = other RNA; note = Related to CP047307.1
actctttagcgttggacggtaacgtctagtcgggtgattagccagactctaacttattgaacgtattaagggttgcgaaagtgtcgcaacccgagatcgttcctctctcgggttgcgacactttcgcttcctctagtaaagagtg

SEQ ID NO: 16927 - RNA, 146 nt, Dickeya dadantii
  source 1..146: mol_type = other RNA; note = Related to NZ_CP023467.1
gctctttagtgttggacgtattacgtcttgtcgggtgattagccagacactaatttattgaacgtatttagggttgcgaaagtgtcgcaacctgaattcgttcctccttcaggttgcgacactttcgcttcctctagtaaagagtc

SEQ ID NO: 16928 - RNA, 146 nt, Serratia liquefaciens
  source 1..146: mol_type = other RNA; note = Related to NZ_DF820431.1
gctctttagtgttggacgtattacgtcttgtcgggtgattagccagacactaatttattgaacgtatttagggttgcgaaagtgtcgcaacctgaactcgttcctccttcaggttgcgacactttcgcttcctctagtaaagagtg

SEQ ID NO: 16929 - RNA, 146 nt, Aeromonas australiensis
  source 1..146: mol_type = other RNA; note = Related to NZ_CDDH01000001.1
gctctttagcgttggacgtattacgtcttgtcgggtgattagccagacaccaatttattgagcgtttttagggttgcgaaagtgtcgcaacccgaactcgttcctccttcaggttgcgacactttcgcttcctctagtaaagagtt

SEQ ID NO: 16930 - RNA, 146 nt, unidentified
  source 1..146: mol_type = other RNA; note = Related to JAGTSE010000026.1; note = Proteobacteria bacterium
gctctttagtgttggacgtattacgtcttgtcgggtgattagccagacactaatttattgaacgcatttagggttgcgaaagtgccgcaacctgaactcgttcctccttcaggttgcggcactttcgcttcctctagtaaagagtc

SEQ ID NO: 16931 - RNA, 147 nt, Proteus penneri
  source 1..147: mol_type = other RNA; note = Related to CVRY01000004.1
actctttagcgtaggacatattatgtcttgtcgggtgattagccagacactaatttattgctcacatttagggttgcgaaagtatcgcaacctgatctcgcgagctccttcaggttgcgatactttcgcttcttctagtaaagagta

SEQ ID NO: 16932 - RNA, 187 nt, Aliivibrio fischeri
  source 1..187: mol_type = other RNA; note = Related to NZ_WOBT01000016.1
gctctttagcttatgacgaacacgtctagtcgggtgattagccagactctaacttattgaacggttttagttgcgaaatgtacgtatttcttcnnnnnnnnnnnnnnnnnnnnnnnnnnnnnnnnnnnnnnnnnnnnnnnnnnnnnnngaagaaatacgtacatttcgctgtctctagtaaagagct

SEQ ID NO: 16933 - RNA, 164 nt, Vibrio tapetis
  source 1..164: mol_type = other RNA; note = Related to NZ_LT960611.1
gctctttagcttaagacgaattacgtctagtcgggtgattagccagactctaacttattgaacgggattggttgcgaaatgtacttacttcttcgcgatccaaactcgttcctcctttagaccgcgaagaagtaagtacatttcgctgtctctagtaaagagct

SEQ ID NO: 16934 - RNA, 161 nt, Vibrio harveyi
  source 1..161: mol_type = other RNA; note = Related to BGNF01000084.1
gctctttagcttaagacgaacacgtctagtcgggtgattagccagactctaacttattgaacggttttagttgcgaaatgtacgtacttcttcgcagccaaactcgttcctcatttgactgcgaagaagtacgtacatttcgctgtctctagtaaagagct

SEQ ID NO: 16935 - RNA, 164 nt, Vibrio harveyi
  source 1..164: mol_type = other RNA; note = Related to NZ_CP045070.1
gctctttagcttaggacgaattacgtctagtcgggtgattagccagactctaacttattgaacgagattagttgcgaaatgtacttacttcttcgctgcctaaactcgttcctcctttaggcagcgaagaagtaagtacatttcgctgtctctagtaaagagct

SEQ ID NO: 16936 - RNA, 164 nt, Vibrio coralliilyticus
  source 1..164: mol_type = other RNA; note = Related to NZ_CP009264.1
gctctttagcttaggacgaattacgtctagtcgggtgattagccagactctaacttattgaacgggattagttgcgaaatgtagttacttcttcgcggtctaaactcgttcctcctttagaccgcgaagaagtaactacatttcgctgtctctagtaaagagct

SEQ ID NO: 16937 - RNA, 165 nt, Vibrio vulnificus
  source 1..165: mol_type = other RNA; note = Related to NZ_CP027030.1
gctctttagcttaggacgaatttcgtctagtcgggtgattagccagactctaacttattgaacgggattgggttgcgaaatgctcgtacatcttcgcagcctagactcgttcctcccttaggctgcgaagatgtacgagcatttcgctgtctctagtaaagagct

SEQ ID NO: 16938 - RNA, 164 nt, Shewanella sp.
  source 1..164: mol_type = other RNA; note = Related to NZ_CP080413.1
gctctttagcttaggacgaatttcgtctagtcgggtgattagccagactctaacttattgaacgggaatggttgcgaaatgttcgtacttcttcgcaccctaaactcgttcctcctttaggctgcgaagaagtacgaacatttcgctgtctctagtaaagagct

SEQ ID NO: 16939 - RNA, 143 nt, Moritella yayanosii
  source 1..143: mol_type = other RNA; note = Related to NZ_LS483250.1
gctctttagcgtaagacgatttcgtctagtcgggtggttagccagactctaatttattgaacgtatttggttgcgaaatattcgcagcataaactcgttcctcctttaggccgcgaacatatcgctgtctctagtaaagagtt

SEQ ID NO: 16940 - RNA, 144 nt, Vibrio vulnificus
  source 1..144: mol_type = other RNA; note = Related to DACQYM010000007.1
gctctttagctaatgacgaacatcgtctagtcgggtggttagccagactcaaatttattgaacggttttcgatgcttggtatacgcatcctaaactcgttcctcctttaggatgcgtataccaagcacccttaagtaaagagtt

SEQ ID NO: 16941 - RNA, 144 nt, Vibrio splendidus
  source 1..144: mol_type = other RNA; note = Related to PIFQ01000001.1
gctctttagcttatgacgaatttcgtctagtcgggtgattagccagactcaaatttattgaacgggtttcgatgctgtgtacacacatcccaaactcgttcctcctttaggatgcatgtacacagcacccttaagtaaagagtt

SEQ ID NO: 16942 - RNA, 143 nt, Enterobacter cloacae
  source 1..143: mol_type = other RNA; note = Related to JAKMJP010000001.1
tgtctttagcgtaaacgggttacaatgtcgggtggttagccagactctaatttattgaacgagttacacgtgcgatgtgttcgcatcccaaactcgttgcctcgtttgggatgcgaacacatcgcaaaccttagtaaagattc

SEQ ID NO: 16943 - RNA, 143 nt, Enterobacter sp.
  source 1..143: mol_type = other RNA; note = Related to JAJCXF010000001.1
agtctttagcgtaaacgagttacaatgtcgggtgtttagccagactctaatttattgaacgagttacacgtgcgatgtgttcgcatcccaaactcgttgcctcgtttgggatgcgaacacatcgcaaaccttagtaaagattc

SEQ ID NO: 16944 - RNA, 145 nt, Vibrio brasiliensis
  source 1..145: mol_type = other RNA; note = Related to JAKEUX010000006.1
gctctttagtgttttgacggactttgtctagtcgggtgtttagccagactctaacttattgaacgagtttacatgcgatgtgtacgcatccaaaactcgttcctcgtttcggatgcgtacacatcgcaccctttagtaaagagct

SEQ ID NO: 16945 - RNA, 147 nt, Kosakonia cowanii
  source 1..147: mol_type = other RNA; note = Related to NZ_CAKODS010000001.1
gctctttagcgtaaaacgagttaaacattgtcgggtgattagccagacactaacttattgaacgagttaaatttgcgatgcattcacatcccaaactcgtctcgctcgtttaggatgcgaacgcatcgcaccctttagtaaagagcg

SEQ ID NO: 16946 - RNA, 146 nt, Citrobacter koseri
  source 1..146: mol_type = other RNA; note = Related to JAASMA010000001.1
gctctttagcgtaaacgggttacaacttgtcgggtgattagccagacactaacttattgaacgagttaaatttgcgatgtattcgcatcccaaactcgtttcgctcgtttgggatgcgaacacatcgcaccctttagtaaagagtc

SEQ ID NO: 16947 - RNA, 148 nt, Vibrio breoganii
  source 1..148: mol_type = other RNA; note = Related to MCZP01000152.1
gctctttagcgtaaacgagattcaaaatagtcgggtgtttagccagactctaacttattgaacgggttatattgcggtgtgttcacatcccaaactcgctctcgctcgtttgggatgcaaacacaccgcaaccctttagttaagagta

SEQ ID NO: 16948 - RNA, 137 nt, Vibrio parahaemolyticus
  source 1..137: mol_type = other RNA; note = Related to NZ_QPQH01000001.1
gctctttagcgtttttatattagtcgggtgattagccagactctaacttattgaacgggtttgcatgcgctgtacacgcatcccaaactcgttcctcgtttgggatgcgtgtacaccgcaccctctagtaaagagct

SEQ ID NO: 16949 - RNA, 136 nt, Vibrio gallaecicus
  source 1..136: mol_type = other RNA; note = Related to NZ_SZZR01000017.1
gctctttagcgttttaatatagtcgggtgtttagccagactctaacttattgaacgggtttgcatgcgttgtaaacgcatcccaaactcgttcctcatttgggatgcatctacaacgcacccttaagtaaagagca

SEQ ID NO: 16950 - RNA, 136 nt, Vibrio ishigakensis
  source 1..136: mol_type = other RNA; note = Related to BBSA01000008.1
atcctttagcgttttagaatagtcgggtgcttagccagactctaacttattgagtgggtttgaatgcgatgtgtacgcatctcaaactcgttcctcatttgagatgcgtacacatcgcacctttaagtaaaggatt

SEQ ID NO: 16951 - RNA, 140 nt, Vibrio lentus
  source 1..140: mol_type = other RNA; note = Related to MCXQ01000034.1
actctttagcttaggacgaatttcgtctagtcgggtgtttagccagactctaacttattgggcactttatgattgcgaaaggtatctttgttcgcnnnnnngcgaacaaagatacctttcgcttcttttagtaaagagtt

SEQ ID NO: 16952 - RNA, 163 nt, Vibrio campbellii
  source 1..163: mol_type = other RNA; note = Related to NZ_CP025953.1
actctttagcttagggcgaatttcgtctagtcgggtgattagccagactctaacttattgggcactttatgattgcgaaaggtatctttgttcgcttcatagagctcgtccctcactttatgaagcgaacaaagatacctttcgcttcttttagtaaagagtt

SEQ ID NO: 16953 - RNA, 145 nt, Pseudoalteromonas sp.
  source 1..145: mol_type = other RNA; note = Related to NZ_LOFH01000001.1
gtcttttagcgaatgaggcatttatgcctagtcgggtgtttagccagactctaacttattgaacgagattgtatgcgatatctgcgcatacaaagctcgttcctcactttgtatgcgcagatatcgcattaactagtaaaagaca

SEQ ID NO: 16954 - RNA, 144 nt, Aeromonas hydrophila
  source 1..144: mol_type = other RNA; note = Related to CP000462.1
gctctttagcttgagacgttttcgtcaagtcgggtgattagccagactcaaatttattgggcggtttaaggttgcgaaaggtccgcgccctaaactcgtacctcctttagggcgcgaacctttcgcctcctgtagtaaagagtc

SEQ ID NO: 16955 - RNA, 143 nt, Citrobacter freundii
  source 1..143: mol_type = other RNA; note = Related to DACSXM010000001.1
actctttagctttggacggattcgtctagtcgggtgattagccagactcaaaattattgaacgggtttaaaagcgatgtatacgcatcctaaactcgttcctcctttaggatgcgtatacatcgcattcttaagtaaagagct

SEQ ID NO: 16956 - RNA, 143 nt, Klebsiella oxytoca
  source 1..143: mol_type = other RNA; note = Related to NZ_CP090245.1
actctttagctttggacgttttcgtctagtcgggtgattagccagactcaaaattattgaacgggtttaaatgcgatgtatacgcatcctaaactcgttcctcctttaggatgcgtatacatcgcattctcaagtaaagagct

SEQ ID NO: 16957 - RNA, 141 nt, Pantoea ananatis
  source 1..141: mol_type = other RNA; note = Related to NZ_JABEBB010000004.1
actctttagcgtggacgttacgtctagtcgggtgttcagccagactcaaatttattgaacgggtttaaatgcaatgtatacgcatcttaaactcgttcctcctttaagatgcgtatacattgcattctttagtaaagagtc

SEQ ID NO: 16958 - RNA, 145 nt, Colwellia sp.
  source 1..145: mol_type = other RNA; note = Related to JACGVM010000019.1
actctttagcttcggacaaaatttgtctagtcgggtgattagccagactctaatttattgaacgggtttatatgcgatatacatgcatcctaaactcgtacctcctttaggatgcatgcataccgcattctttaagtaaagagtg

SEQ ID NO: 16959 - RNA, 144 nt, Marinomonas primoryensis
  source 1..144: mol_type = other RNA; note = Related to NZ_CP016181.1
gctctttagcttaggacgttttcgtctagtcgggtgttaagccagactctaatttattgaacgggatatggttgcgcggcaagcgcaacctagactcgttcctcgcttaggttgcgcttgccgcgcttcctctagtaaagagtg

SEQ ID NO: 16960 - RNA, 148 nt, Snodgrassella alvi
  source 1..148: mol_type = other RNA; note = Related to MEIT01000084.1
aatctttagcgatatggactttattgtctagtctggtgtttagccggactcaaatttattgtgtggatttcggttgcgaaagaatcagttcctaaccccgattatcgtgcttagtaactgattctttcgcgtcctttagtaaagattg

SEQ ID NO: 16961 - RNA, 147 nt, Snodgrassella alvi
  source 1..147: mol_type = other RNA; note = Related to MEIK01000040.1
aatctttagcgatacggacgtaattgtctagtctggtgcttagccggactctaatttattgagtggaattggttgcgaaagaatcagtttctaatcccgattctcggtctcagaaactgcttctttcgcgttctttagtaaagattg

SEQ ID NO: 16962 - RNA, 132 nt, Snodgrassella alvi
  source 1..132: mol_type = other RNA; note = Related to CP091515.1
aatctttagcgttacagactttattgtctagtctggtgtttagccggactcaaatttattgtgtggatttggttgcgaaataaccagtttctcattcgaaactgtttatttcgcttcctttagtaaagatta

SEQ ID NO: 16963 - RNA, 142 nt, Enterobacter cloacae
  source 1..142: mol_type = other RNA; note = Related to CP010512.1
gttctctagcttggcaatcttgccttgtcgggtgtttagccagacactaagttattgaacgagtttgcatgcggtgtgtacgcattccaaactcgttccctcatttggaatgcgtacacaccgcattctcaagtagagaacg

SEQ ID NO: 16964 - RNA, 142 nt, Citrobacter freundii
  source 1..142: mol_type = other RNA; note = Related to DACSVK010000003.1
gctctttagcttgacgttttacgtcttgtctggtgatcagccagacactaagttattgaacgagtttacatgcggtatgtacgcattccaaactcgttcctcctttggaatgcgtacataccgcatcctctagtaaagagct

SEQ ID NO: 16965 - RNA, 160 nt, Acinetobacter sp.
  source 1..160: mol_type = other RNA; note = Related to JALGBR010000010.1
actctttagcttttaggacttaacaagtctagtcgggtgtttagccagactctaatttattgactgcatttgaagaacaaaagtttaaattgttcgctcatatgtttgctcacgcacatattcgcaaacaattgaaacttttgctctatagtaaagagta

SEQ ID NO: 16966 - RNA, 158 nt, Acinetobacter junii
  source 1..158: mol_type = other RNA; note = Related to VYTC01000001.1
gctctttagctttaagacgtaaccgtctagtcgggtgtttagccagactctaatttattgattgcatttgcagaacaaaagtttaaattgttcgctcacatgtttgcttacgcacatattcgcaaacaattgaaacttttgctctatagtaaagagta

SEQ ID NO: 16967 - RNA, 146 nt, Acinetobacter seifertii
  source 1..146: mol_type = other RNA; note = Related to KB851203.1
gctctttagcttttaggacttaacaagtctagtcgggtgtttagccagactctaatttattgaccacatttggagaacaaaagtttcaattcttcgctcatgcgaattcgcaaacaattgaaacttttgctctaaagtaaagagta

SEQ ID NO: 16968 - RNA, 152 nt, Acinetobacter sichuanensis
  source 1..152: mol_type = other RNA; note = Related to NZ_PYIX02000002.1
gctctttagctttaggacttaacagtctagtcgggtgtttagccagactctaacttattgatgaaactcattgcaatactgcagacctaaagtttcaattcttcgctcggttctcgcaaacaattgaaactttagctctaaagtaaagagta

SEQ ID NO: 16969 - RNA, 153 nt, Acinetobacter sp.
  source 1..153: mol_type = other RNA; note = Related to LSZI01000016.1
gctctttagctttaggacttaacagtctagtcgggtgtttagccagactctaatttattgaccacatttggagaacaaaagtttaaattgttcgctcatttgctatgcgctcattcgcaaacaattgaaacttttgctctgaagtaaagagta

SEQ ID NO: 16970 - RNA, 146 nt, Acinetobacter haemolyticus
  source 1..146: mol_type = other RNA; note = Related to CP031984.1
gctctttagctttaggacttaaccgtctagtcgggtgtttagccagactctaacttattgatgaatcacattgaagaacaaaagtttaaattgttcgctcacgttgttcgcaaacaattgaaacttttgctcttaagtaaagagta

SEQ ID NO: 16971 - RNA, 146 nt, Acinetobacter sp.
  source 1..146: mol_type = other RNA; note = Related to NZ_VPEY01000001.1
gctctttagctttgggacttaacagtctagtcgggtgtttagccagactctaacttattgatgaaacacattggagaacaaaagtttcaattcttcgctcatgtgattcgcaaacaattgaaacttttgctctaaagtaaagagcg

SEQ ID NO: 16972 - RNA, 141 nt, Acinetobacter baumannii
  source 1..141: mol_type = other RNA; note = Related to CP018254.1
gctctttagttttaggacgtaacagtctagtcgggtgtatagccagactccaacttattgatgtttttgtgaatcagaagttttactacttcgctcatatcttcgcaaactattaaaacttctgctcattagtaaagagta

SEQ ID NO: 16973 - RNA, 141 nt, Acinetobacter baumannii
  source 1..141: mol_type = other RNA; note = Related to DADATW010000032.1
gctctttagttctaggacgtaacagtctagtcgggtgtatagccagactccaacttattgatgttattgtgaatcagaagttttactacttcgctcatatcttcgcaaactactaaaacttctgctcattagtaaagagta

SEQ ID NO: 16974 - RNA, 148 nt, Acinetobacter baumannii
  source 1..148: mol_type = other RNA; note = Related to CP009256.1
actctttagcttttgacttttactggtcaagtcgggtgctaagccagactctaatttattgcgtacactttaggttgcgaaacaacagcatcctaaattgcgtagcctcatttaggatgctgttgttccgcctccttagtaaagagtt

SEQ ID NO: 16975 - RNA, 148 nt, Acinetobacter johnsonii
  source 1..148: mol_type = other RNA; note = Related to NZ_CP090180.1
actctttagcttatgacttttaccagtcaagtcgggtgttaagccagactctaacttattgcgtacactttaggttgcgaaactacagcatcctaaattacgtagcctcatttaggatgctgtagttccgcctcctgtgtaaagagtt

SEQ ID NO: 16976 - RNA, 136 nt, Parasutterella excrementihominis
  source 1..136: mol_type = other RNA; note = Related to NZ_GL883764.1
gcttcttagcgtttaatagattaagtcgggtgttaagccagattgaattttcctgttggcattggagcggcctctcgccgccttaatgcctgataacagccaataaagcggcgagaggccgtctctagtaaggagc

SEQ ID NO: 16977 - RNA, 158 nt, Acinetobacter guillouiae
  source 1..158: mol_type = other RNA; note = Related to NZ_CP083989.1
gctctttagctatgggttctatgagcctagtcgggtgttaagccagactcaaatttattgggaacattgagcgttgcgaaaggtatatacctttcgcttacatgctttcacatgttcacaaaaggtatatacctttcgcttcgtatgagtagagagta

SEQ ID NO: 16978 - RNA, 157 nt, Acinetobacter gyllenbergii
  source 1..157: mol_type = other RNA; note = Related to KI530706.1
gctctttagttatgggttctatgggcctagtcgggtgttaagccagactcaaatttattgagagcattgagcgttgcgaaaggtagatacctttcgctcaatgttcgcacatattcgcaaaaggtatctacctttcgcttcgtatgagtagagagta

SEQ ID NO: 16979 - RNA, 160 nt, Acinetobacter baumannii
  source 1..160: mol_type = other RNA; note = Related to NZ_MABW01000006.1
gctctttagctatgggttcatagagcctagtcgggtgttaagccagactcaaacttattgggagcattgagcgttgcgaaaggtataaacctttcgctcacatgttcctgtacatgttcgcaaaaggtttatacctttcgcttcgtatgagtaaagagca

SEQ ID NO: 16980 - RNA, 151 nt, Acinetobacter pittii
  source 1..151: mol_type = other RNA; note = Related to LWHP01000001.1
gctctttagctttaggactttttgagtccggtcgggtgttaagccagaccctaatttattgattgccatggcgttgcgaaagtagagatacttccgctgcgcttacgcttacagaagtatctctactttcgctgcgtgtgagtaaagagca

SEQ ID NO: 16981 - RNA, 183 nt, Vibrio furnissii
  source 1..183: mol_type = other RNA; note = Related to QJUD01000001.1
gctctttagtgttaatttggattgaattttcagtagtttaatctagtttggcgatgcgctaaactctcatttattgggcagatttgcagttgcggaacaagattttagacccgcaaccgctgctcatccttcgcagacgcttgcggatctaaaatcttgttccgcggcttcgagtaaagagct

SEQ ID NO: 16982 - RNA, 181 nt, Vibrio kanaloae
  source 1..181: mol_type = other RNA; note = Related to SYUN01000005.1
gctctttagtgtaatttagattgaatttcaaaagtttagtctagtctggcgatgcgccaaactctcatttattgggcacatttgcagttgcggaacaacattttagacccgtaaccgctgctcatgcttcacagacgcttacggatctaaaatgttattccgcggcttctagtaaagagct

SEQ ID NO: 16983 - RNA, 180 nt, Photobacterium kishitanii
  source 1..180: mol_type = other RNA; note = Related to PYNL01000004.1
gctctttagcgtaattttgattagataaatctatttaatcttgtttggcgttgcgccaaacactcatttattgggcagatttacagttgcggaacaagatttttgagccgcaatcactgctcatccttcacagatgcttacggatcaaaaatcttgttccgcggctaaaagtaaagagct

SEQ ID NO: 16984 - RNA, 181 nt, Shewanella sp.
  source 1..181: mol_type = other RNA; note = Related to JABAIP010000015.1
gctctttagtgttattaggattaactctatgatgtttaatctagtttggtgttgcgccaaactctaatttattgggcagatttacagttgcggaacaacatttttgagccgcaaccgctgctcatccttcgcagacgcttacggatcaaaaatgttgttccgcggctttaagtaaagagca

SEQ ID NO: 16985 - RNA, 181 nt, Vibrio nigripulchritudo
  source 1..181: mol_type = other RNA; note = Related to CAOA01000025.1
gctctttagcgtaatttagattagataatgttgatttaatctagtttggcgttgcgccaaactctaacttattgggcagttttacagttgcggaactaaatttttgagccgcaaccgctgctcattcttcacagacgcttacggatcaaaaatttagttccgcggcttctagtaaagagct

SEQ ID NO: 16986 - RNA, 183 nt, Rheinheimera pacifica
  source 1..183: mol_type = other RNA; note = Related to NZ_FNXF01000018.1
gctctttagtgttttcaggattagtcctgcaaggattgatctagttcggcgttgcgccgaactctaaattattgggcagatttgcggttgcggaacaaaatttttgagcctcaattcgtagttcgtccctcacttcgcctttcggatcaaaaattttgttccgcggctaactagtaaagagcg

SEQ ID NO: 16987 - RNA, 184 nt, Psychromonas arctica
  source 1..184: mol_type = other RNA; note = Related to NZ_AXWP01000001.1
actctttagcgttttttggattaaattcaaatgctttaatctagtttggcgttgcgccaaactctaacttattgagcatatttatagttgcggaacaaaatttctgaaccgcaatacgttgctcatacttcacatccgcttacggatcagaaatgttgttccgctagcttctaggtaaagagtc

SEQ ID NO: 16988 - RNA, 182 nt, Pseudoalteromonas sp.
  source 1..182: mol_type = other RNA; note = Related to JADYXL010000005.1
gcactttagcgttattttggttagatattaaatatttaatctagtttggcgatgcgccgaactctaatttattgagtacattcaaagttgcgaaataaaactcctgaactgcaatccgttgttcgtacctcacagccgtttgcagatcaggagtttgattccgcgtctactagtaaagggca

SEQ ID NO: 16989 - RNA, 168 nt, Pectobacterium wasabiae
  source 1..168: mol_type = other RNA; note = Related to CP015750.1
gctctttagcgtattgtggatttaccatgtttttggtcaaatctagttgggcgttgcgccgaactctaatttattgattacatttacagttgcggaacaaactttttgagccgcaatccagtaggttgcggatcaaaaagtttgttccgcggctacaagtaaagagcc

SEQ ID NO: 16990 - RNA, 168 nt, Klebsiella quasipneumoniae
  source 1..168: mol_type = other RNA; note = Related to DAFWTN010000002.1
gctctttagcgtattatggatttaccacctgattggtcaaatctagttgggcgttgcgccaaactctaatttattgattacatttacagttgcggaacaaactttttgagccgcaatccagtaggttgcggatcaaaaagtttgttccgcggcttcaagtaaagagcc

SEQ ID NO: 16991 - RNA, 164 nt, Serratia quinivorans
  source 1..164: mol_type = other RNA; note = Related to UGYN01000002.1
gctctttagcgtagtatgggttttaccattgaaggttaaatctagtttggcgatgcgctgaactctaacttattgattacatttacagttgcggaacaacatttctgagccgcagccgtagttgcggatcagaaatgttgttccgcggcttctagtaaagagca

SEQ ID NO: 16992 - RNA, 171 nt, Pseudoalteromonas luteoviolacea
  source 1..171: mol_type = other RNA; note = Related to JAGJEM010000002.1
gctctttagcgtaatttggattagttttaatctagtttgatgatgcgtcaaactcaaatttattgagcaatattctgcgctgcggaaagaaattttcgatccgcagttcttgctcatccttcgcaaaactgcggatcaaaaatttccttccgcggcgactagtaaagagca

SEQ ID NO: 16993 - RNA, 179 nt, Colwellia polaris
  source 1..179: mol_type = other RNA; note = Related to NZ_NBOE01000008.1
gctctttagtgtatttttgattgaatttaatggtttaatctagtttggcgttgcgccaaactcaaatttattgagtacatttacagttgcgaaatcaaattattgatccgtgatatgtactcatacttcgcacagataacggatcaataatttgattccgcgtctttaagtaaagagta

SEQ ID NO: 16994 - RNA, 178 nt, Vibrio parahaemolyticus
  source 1..178: mol_type = other RNA; note = Related to NNIR01000014.1
gctctttagcgtaatttggattaagtttatgatttaatctagtttggcgttgcgccgaactctaatttattgagtggttttgcagctgcggaacggcatttccgaactgcaatagttactcattcttcgcaacgattgcagatcggaaatgccgctccgcgtctttaagtaaagagct

SEQ ID NO: 16995 - RNA, 178 nt, Aliivibrio finisterrensis
  source 1..178: mol_type = other RNA; note = Related to SEZJ01000011.1
gctctttagcgtaatttggattgaatttatgatttaatctagtctggcgttgcgccaaactctaatttattgagtggttttgcagctgcggaacaatatttccgaactgcaatcgtcactcattcttcgcaacgattgcagatcggaaataccgttccgcgtctttaagtaaagagct

SEQ ID NO: 16996 - RNA, 179 nt, Vibrio brasiliensis
  source 1..179: mol_type = other RNA; note = Related to JAKEVQ010000003.1
gctctttagcgtaatttggattaagcttagtgttttaatctagtttggcgttgcgccaaactctaatttattgagtgcttttgcagctgcggaacggcattcccgatctgcaatagttactcattcttcgcaacgattacagatcggaaatgccgatccgcgtctttaagtaaagagct

SEQ ID NO: 16997 - RNA, 178 nt, Vibrio sp.
  source 1..178: mol_type = other RNA; note = Related to PIZL01000016.1
gctctttagcgtaatttggattaatcttacgatttaatctagtttggcgttgcgccaaactctaatttattgagtggttttgcagctgcggaacggtatttccgaactgcaatagttactcattcttcgcaacgattgcagatcggaaataccgctccgcgtcttttagtaaagagct

SEQ ID NO: 16998 - RNA, 179 nt, Alteromonas sp.
  source 1..179: mol_type = other RNA; note = Related to JAEFCD010000023.1
gctctttagcgtaatttggattagatcttgtaatttaatctagtttggcgttgcgccaaactcaaatttattgagtagttttacggttgcggaacgacattatcgatccgcaatagttgctcattcttcgcaccgattgcggatcgataatgtcgttccgcgtctcaaagtaaagagta

SEQ ID NO: 16999 - RNA, 179 nt, Vibrio sp.
  source 1..179: mol_type = other RNA; note = Related to VTYC01000009.1
gctctttagcgtaatttggattagatttattgatttaatctagtttggcgttgcgccaaactctaacttattgagtaattttacagttgcggaacgacattatcgatccgtgatagttactcattcttcgcaacgatcacggatcgataatgtcgttccgcgtcttaaagtaaagagtc

SEQ ID NO: 17000 - RNA, 179 nt, Photobacterium carnosum
  source 1..179: mol_type = other RNA; note = Related to WMDD01000002.1
actctttagcgtaatttggattaaatttataggtttaatctagtttggcgttgcgccaaactctaatttattgagtagttttacagttgcggatcgaaattttcgaaccgtaatagttactcattcttcgtaccgattacggatcgaaaatttcgctccgcgtctttaagtaaagagtt

SEQ ID NO: 17001 - RNA, 174 nt, Shewanella algae
  source 1..174: mol_type = other RNA; note = Related to JADZHL010000041.1
gctctttagcgttatacggattaggtactacttagtctagtttggcgatgcgccaaactctaacttattgagggcattcacagttgcggaacaacatttttgaaccgcagttgtttactccctcgtaaaaactgcggttcaaaaatgttgttccgctgcttctagtaaagagca

SEQ ID NO: 17002 - RNA, 178 nt, unidentified
  source 1..178: mol_type = other RNA; note = Related to PAZB01000040.1; note = Idiomarinaceae bacterium
gctctttagcgtatgttggattagactgttatgggtttgatctagtttggcgatgcgccgaactctaatttattgagcacttttagagttgcggaactaaagtttagaaccgctccttcactcggtgctcgcgcgccacggttctaaactttagttccgcggcttcaagtaaagagca

SEQ ID NO: 17003 - RNA, 152 nt, Serratia fonticola
  source 1..152: mol_type = other RNA; note = Related to NZ_CP054160.2
gctctttagcgtatggacggtttttgcgtctagtcgggcggttagccagactctaacttattgagcacttttatgattgcgataaacacttcatcgcatcataaagtgttatgatgcgatgaagtgtttatcgcggcttctagtaaagggct

SEQ ID NO: 17004 - RNA, 152 nt, Serratia ureilytica
  source 1..152: mol_type = other RNA; note = Related to JADTXI010000006.1
gctctttagcgtaaggacgaattatacgtctagtcgggcggttagccagactcaaacttattgagcacttttatgattgcgataaacacttcatcgcatcataaagtgttatgatgcgatgaagtgtttatcgcggcttctggtaaagggcg

SEQ ID NO: 17005 - RNA, 166 nt, Serratia marcescens
  source 1..166: mol_type = other RNA; note = Related to CP059036.1
gctctttagtgtcggaacaatggttccagccgggtgtttagccaggcgctaatttattgtccatttcaggattgcgaaagacacacacttctccttcgcctatcctgctctgggcagtctatgcgaaggagaagtgcgtgtctttcgctgtctttagtaaagagcg

SEQ ID NO: 17006 - RNA, 166 nt, Pectobacterium brasiliense
  source 1..166: mol_type = other RNA; note = Related to NZ_JACHAQ010000007.1
gctctttagtgtaggaacaatggttccagccgggtggttagccaggctctaatttattgtccattttagggttgcgaaagacacgcacttctccttcgcatttcctgctttgggcagtctctgcgaaggagaagtgcgtgtctttcgctgtctttagtaaagggca

SEQ ID NO: 17007 - RNA, 166 nt, Klebsiella aerogenes
  source 1..166: mol_type = other RNA; note = Related to NZ_LR607333.1
gctctttagtgtaggaacaatggttccagccgggtggttagccaggctctaatttattgtccataatagggttgcgaaagacacacacttctccttcgcatatcctgcttatggcagtcaatgcgaaggagaagtgcgtgtctttcgctgtctttagtaaagggca

SEQ ID NO: 17008 - RNA, 137 nt, Pectobacterium polaris
  source 1..137: mol_type = other RNA; note = Related to JACHAS010000001.1
gctctttagcgtaggaacattggttccagccgggtgattagctaggctctaatttattgtccacatcagggttgcgaaagacacgcacttcgtctnnagacgaagtgcgtgtctttcgctgtctttagtaaagggct

SEQ ID NO: 17009 - RNA, 165 nt, Leclercia sp.
  source 1..165: mol_type = other RNA; note = Related to PQJY01000001.1
gctctttagcgtaggaacataggttccagccgggtgtttagccaggcttaaatttattgtccagtttagggttgcgaaagacacagagtcctccttcgcatccctggctggtaccagatatgcgaaggaggactctgcgtctttcgctgtctttagtgaagagtc

SEQ ID NO: 17010 - RNA, 164 nt, Escherichia coli
  source 1..164: mol_type = other RNA; note = Related to CP026641.1
gctctttagtgtaggaacattggttccagccgggtgattagccaggcttaaatttattgtccggtttagggttgcgaaagacacagatttctccttcgcatccctgcccggggcagatatgcgaaggagaaatctgtgtctttcgctgtctttagtgaagagtc

SEQ ID NO: 17011 - RNA, 165 nt, Enterobacter mori
  source 1..165: mol_type = other RNA; note = Related to JAHEUL010000001.1
gctctttagtgtaggaacattggttccagccgggcgattagccaggcttaaatttattgtccagtttagggttgcgaaagacacagatttctccttcgcctctctggctggtgccagatatgcgaaggagaaatctgtgtctttcgctgtctttagtgaagagtc

SEQ ID NO: 17012 - RNA, 166 nt, Serratia marcescens
  source 1..166: mol_type = other RNA; note = Related to LFJS01000012.1
gctctttagcgctatggaccttaattagtggtctagccgggcgtttagccaggctctaacttattgggcacatttggttgcgaaagtaacgcattcgcttcctcgatctccgtgccgtcgttcgtggaagcgaatgcgttactttcgctgtctttagtaaagagct

SEQ ID NO: 17013 - RNA, 160 nt, Pantoea agglomerans
  source 1..160: mol_type = other RNA; note = Related to JACYNT010000005.1
gctctttagcgaaggacctaagatttggtctagccgggtgtttagccaggctctaatttattgagcacattgaggttgcgaaagtcacgcattcgcttcctcaaacgagtgttcgttctcgaaagcgaatgcgtaactttcgctgtctttagtaaagagc

SEQ ID NO: 17014 - RNA, 171 nt, Escherichia coli
  source 1..171: mol_type = other RNA; note = Related to CP057778.1
gctctttagcgttagggaaccattgcgttctagccgggcgataagccaggctctaatttattgctcagtttagggttgcgaaagcgacgaattccgccttcgcatcctatggctgttgccatagtttacgaaggcggaattcgtcgctttcgctgtctttagtgaagagct

SEQ ID NO: 17015 - RNA, 169 nt, Vibrio cholerae
  source 1..169: mol_type = other RNA; note = Related to CP003330.1
gctctttagcgaatggactacacatattagtctagtcgggcgtttagccagactgaaatttattgaacgacactggggttgcgaaatggaggtttttctctcctctcgcatttccctgaactgcgagaggagagaaaaacctccatttcgctgtctctagtaaagagct

SEQ ID NO: 17016 - RNA, 169 nt, Vibrio fluvialis
  source 1..169: mol_type = other RNA; note = Related to JAHUGH010000003.1
gctctttagcgtacggactacacaaattagtctagtcgggcgtttagccagactgaaatttattgaacgacactggggttgcgaaatggagatttttctcttctctcgcagttccccaaactgcgagagaagagaaaaatctccatttcgctgtctctagtaaagagct

SEQ ID NO: 17017 - RNA, 179 nt, Vibrio parahaemolyticus
  source 1..179: mol_type = other RNA; note = Related to JACBSQ010000003.1
gctctttagtgcttggactactattattagtctagtcgggcgtttagccagactcaaacttattgaacgacactggggttgcgaaaggtatacaaacatttttcgcagctcttcactcgttcctcataaagatctgcgaaaaatgtttgtacacctttcgctgtctctagtaaagagct

SEQ ID NO: 17018 - RNA, 180 nt, Vibrio alginolyticus
  source 1..180: mol_type = other RNA; note = Related to AAXMKO010000002.1
gctctttagtgtttggactatcaaattttagtctagtcgggtgcttagccagactcaaacttattgaacgacactggggttgcgaaagacactcttaagttttccgcatctctctgctcgttcctcacagaaatctgcgaaaaacttaagagtgtctttcgctgtctctagtaaagagct

SEQ ID NO: 17019 - RNA, 178 nt, Vibrio cyclitrophicus
  source 1..178: mol_type = other RNA; note = Related to MCWW01000053.1
gctctttagcgtttgggctacctaaaattagtctagtcgggtgtttagccagactcaaatttattgaacgagattggggttgcgaaatgtaccagcaaattttcgcacatccctgctcgttcctcacagaaatttgcgaaaatttgcttgtacatttcgctgtctctagtaaagagct

SEQ ID NO: 17020 - RNA, 141 nt, Aggregatibacter actinomycetemcomitans
  source 1..141: mol_type = other RNA; note = Related to JACAWH010000114.1
accttttagcgtatgtctacaagttttagttcggtgtttagccgtaacgtatttatattgggcacatatgggttgcgagacaaacgtcaagcaactcaataagttgcttgacgtttgtctcgcttccattagtaaaaggtc

SEQ ID NO: 17021 - RNA, 140 nt, Haemophilus parainfluenzae
  source 1..140: mol_type = other RNA; note = Related to NZ_QEPT01000001.1
gccttttagtgtatgtctacaagtttagttcggtgtttagccgtaacatgtttatattgggcagatatgggttgcgagacaaatgtcaagcaactcaactagttgcttgacatttgtctcgcttccattagtaaaaggcc

SEQ ID NO: 17022 - RNA, 150 nt, Haemophilus parahaemolyticus
  source 1..150: mol_type = other RNA; note = Related to CP069510.1
gccttttagcgtatgtctatgaaagcttagctttagttcggtgtttagccgcaacgtatttatattgggcagataagggttgcgagacaaatgtcaagcaactctgaataagttgcttgacatttgtctcgcttccattagtaaaaggtt

SEQ ID NO: 17023 - RNA, 149 nt, Serratia marcescens
  source 1..149: mol_type = other RNA; note = Related to NZ_CP060440.1
gctctttagcttaggaccaaatcaacggtctagccgggtgtttagccaggctctaatttattgaacgacataaggttgcgaaaggtgcagagcccggccttcgtaccttgtccgggagctgcacctttcgcttcctttagtaaagagtc

SEQ ID NO: 17024 - RNA, 155 nt, Aeromonas veronii
  source 1..155: mol_type = other RNA; note = Related to JAEHHT010000028.1
gctctttagtgtgcagactaacgtgattagtctagtcgggtgtttagccagactctaacttattgaacggatctgaggttgcgaaagcatcgcattcctagatccgcttcgcttgtctaggaatgcgatgctttcgcggcctctagtaaagagca

SEQ ID NO: 17025 - RNA, 167 nt, Vibrio parahaemolyticus
  source 1..167: mol_type = other RNA; note = Related to NNJO01000006.1
gccctttagcgttcggactttatgtcttgtcgggcgataagccagacactaacttattggggaacaattgcggttgcggtgaaaaatcttttctcgcgttctgcaggctcgttcctcaccagcaggtcgcgagaaaagattttccaccgcttcctttagtaaaggga

SEQ ID NO: 17026 - RNA, 165 nt, Vibrio splendidus
  source 1..165: mol_type = other RNA; note = Related to PIFK01000090.1
accctttagcgtatggactctatgtcttgtcgggtgctaagccagacactaacttattggggaacaactgcggttgcggtgaaaaatatttcccgcgctctgcctgctcgttcctctcagccaggtcgcgggaaatattttccaccgcttcctttagtaaaggga

SEQ ID NO: 17027 - RNA, 163 nt, Salinivibrio costicola
  source 1..163: mol_type = other RNA; note = Related to NZ_LT897828.1
accttttagcgtatggacttgatgtcttgtcgggcggttagccagacactaacttattggggagcaattggggttgcggtgaaaaatgtttccgcgacctgtagttcgttcctcactagcaggtcgcggaaacattttccaccgcttccttcagtaaaaggag

SEQ ID NO: 17028 - RNA, 183 nt, Proteus vulgaris
  source 1..183: mol_type = other RNA; note = Related to NZ_NBUT01000010.1
gttctttagtgttaagacattctctgattaatcaggattagtctagtcgggcgttacgccagactctaatttattgggaaacaattgttgttgcggtgaataaattttaaatccgcaacccaactgtgccacagttagtttgcggatttaaaatttattcaccgctttctttagtaaagaact

SEQ ID NO: 17029 - RNA, 168 nt, Pseudoalteromonas arctica
  source 1..168: mol_type = other RNA; note = Related to NZ_CP011025.1
atcctttagcgttaagacattatgtctagtcgggcggtacgccagactcaaatttattggggaacatttttggttgcggagaagaacttttctcttcgtatcaattcttcgttcctcagcctagctacgaagagaaaagttcttctccgcttcctttagtaaagggtt

SEQ ID NO: 17030 - RNA, 175 nt, Shewanella putrefaciens
  source 1..175: mol_type = other RNA; note = Related to NZ_CP080635.1
aacctttagtgtatggactatttagtctagtcgggcgctaagccagactctaacttattgggacacatttttggttgcgggaagggaaatatccatttccaccgccaatcgttcgtccctcacgctcggcagcggaaatggatatttctcttcccgcttcctttagtaaaggtgt

SEQ ID NO: 17031 - RNA, 163 nt, Photobacterium frigidiphilum
  source 1..163: mol_type = other RNA; note = Related to NZ_PYMJ01000011.1
atcctttagtttatagacattaagtctagtcgggcgataagccagactctaatttattggggagttctgcgattgcggtgtaaattttatccgcgttcgctcaacgagttcctcgtttctcggtcgcggataaaatctacaccgcttccttaagtgaaggatt

SEQ ID NO: 17032 - RNA, 163 nt, Vibrio splendidus
  source 1..163: mol_type = other RNA; note = Related to MCYX01000113.1
atcctttagtgtttagacattcagtctagtcgggcgataagccagactctaatttattggggagttctgcgattgcggtgtaaattttatccgcgttcgctcaacgagttcctcgtttctcggtcgcggataaaatctacaccgctgccttaagtaaaggatt

SEQ ID NO: 17033 - RNA, 160 nt, Shewanella benthica
  source 1..160: mol_type = other RNA; note = Related to ABIC01000002.1
accctttagcgtttagacatttttgtctagtcgggcgataagccagactcaaatttattgggaagttctgcggttgcactaataaaattacgcaaccgctcaacgagtccctcgtttcacggttgcgtaattttattagcgcttcctttagtaatgggca

SEQ ID NO: 17034 - RNA, 156 nt, Photorhabdus khanii
  source 1..156: mol_type = other RNA; note = Related to NZ_WHZZ01000005.1
gccctttagcgtgaagactatgtagtctagtcgggcgataagccagactctaaattattggaaggttatggggttgcggtaggaaaacgccgcaaccgctcacctgttctgttcccggttgcggcgttttcctaccgcatcctttagtaaagggtt

SEQ ID NO: 17035 - RNA, 85 nt, Yersinia frederiksenii
  source 1..85: mol_type = other RNA; note = Related to NHOK01000005.1
attggggttgcggtaggaattctccgcaaccgctcacttgttcgcggttgcggagaattcctaccgcatcctttagtaaaaggca

SEQ ID NO: 17036 - RNA, 160 nt, Photobacterium carnosum
  source 1..160: mol_type = other RNA; note = Related to NZ_WMDE01000055.1
cccctttagcgtatagacttttgtctagtcgggcgttacgccagactcaaatttattggggaacaattccggttgcggtgaaaaatttcccgcgggccggagttcgtacctcacatccggatcgcgggaaattttccaccgcttcctttagtaaagggga

SEQ ID NO: 17037 - RNA, 160 nt, Vibrio sp.
  source 1..160: mol_type = other RNA; note = Related to JAKEUP010000008.1
accctttagcgttaattggactagttttattggtctagtcgggcgatacgccagactcaaatttattggggaacaattttggttgcggttgaaaattttctggcccgactcgttcctcgtccggaagtaaattttaaaccgcttcctctagtaaagggat

SEQ ID NO: 17038 - RNA, 159 nt, Vibrio parahaemolyticus
  source 1..159: mol_type = other RNA; note = Related to AAZQRX010000007.1
accctttagcgcaggacatcatcgtctagtcgggtgttaagccagactcaaacttattggggactttgctggttgcggtgaaaaatttttcccgcgggcctgctcgttcctcgccggatagcgggaaaaattttccaccgcttcctttagtaaagggtt

SEQ ID NO: 17039 - RNA, 162 nt, Vibrio crassostreae
  source 1..162: mol_type = other RNA; note = Related to NZ_JAFNJW010000049.1
accctttagtgttagacaaatttgtctagtcgggcgttacgccagactcaaacttattggagaataattccggttgcggtagaaaatttttccgcgagccggactcgttcctcctcctagaacgcggaaaagatttcctaccgcttcctttagtaaagggga

SEQ ID NO: 17040 - RNA, 152 nt, Serratia marcescens
  source 1..152: mol_type = other RNA; note = Related to JABCPW010000001.1
gtcctttagcgttcagacgtttacgtctagtcgggcgattagccagactctaacttattgtaaagtttcgtggttgcggtattcgttctccgcagccgctcgaaaccttcgcggctgcggagaacgaataccgcatccttaagtaaagggct

SEQ ID NO: 17041 - RNA, 152 nt, Serratia marcescens
  source 1..152: mol_type = other RNA; note = Related to PEHA01000001.1
gtcctttagcgttcagacgattgcgtctagtcgggtgattagccagactctaacttattgttaagtttcgtggttgcggtagttgttctccgcagccgcttgtaaacttcgcggctgcggagaacaactaccgcatccttaagtaaagggca

SEQ ID NO: 17042 - RNA, 152 nt, Raoultella ornithinolytica
  source 1..152: mol_type = other RNA; note = Related to AP021969.1
gtcctttagcgttcagacggttacgtctagtcgggcgattagccagactctaacttattgttgggttccgtggttgcggtagtcgttctccgcagccgctcgaaaccatcgcggctgcggagaacgactaccgcatcctttagtaaagggca

SEQ ID NO: 17043 - RNA, 152 nt, Klebsiella pneumoniae
  source 1..152: mol_type = other RNA; note = Related to CP019077.1
gtcctttagcgtttagacgattacgtctagtcgggtgattagccagactctaacttattgtggggtttcgtggttgcggtagtcgttctccgcagccgcttgaacccatcgcggctgcggagaacgactaccgcatcctttagtaaaggaca

SEQ ID NO: 17044 - RNA, 151 nt, Lonsdalea britannica
  source 1..151: mol_type = other RNA; note = Related to CP023009.1
gccctttagcgttcagacggttacgtctagtcgggcgttaagccagactctaacttattgtggggtttcgtggttgcggtagtcgttcttcgcatccactcccctagtcgtggatgcgaagaacgactaccgcatcctttagtaaagggtt

SEQ ID NO: 17045 - RNA, 152 nt, Proteus mirabilis
  source 1..152: mol_type = other RNA; note = Related to NZ_CP029133.1
gtcctttagcgtttagacgattacgtctagtcgggtgattagccagactctaacttattgtgaggattcgtggttgcggtagtagttccctgcaaccgctcgaaatcttcacggcggcagggaactactaccgcatcctttagtaaaggacc

SEQ ID NO: 17046 - RNA, 153 nt, Enterobacter asburiae
  source 1..153: mol_type = other RNA; note = Related to NZ_RXRP01000001.1
gtcctttagcgttcagacggttacgtctagtcgggcgataagccagactcaaatttattggtcggattcgtggttgcggtagttgttctccgcagccgcgattagccaatcacggctgcggagaacaaccaccgcatcctttagtaaaggaca

SEQ ID NO: 17047 - RNA, 160 nt, Pectobacterium carotovorum
  source 1..160: mol_type = other RNA; note = Related to NZ_CP051652.1
gtcctttagcgtatagacggtcatcgtcttgtcgggcgttcagccagacactaagttattggaaggtttatgaggttgcggtaggtataatcctccgccgctccatgccttgcatctcacggcggaggattatacctaccgcatccttaagtgaaggacg

SEQ ID NO: 17048 - RNA, 160 nt, Yersinia intermedia
  source 1..160: mol_type = other RNA; note = Related to NZ_LR134116.1
gtcctttagcgtataggcgatcatcgtcttgtcgggcgtttagccagacactaagttattggaaggtttatgaggttgcggtaggtataatcctccgccgctccatgccttgcatctcgcggcggaggattatacccaccgcatccttaagtaaagggca

SEQ ID NO: 17049 - RNA, 160 nt, Salmonella enterica
  source 1..160: mol_type = other RNA; note = Related to AAXBOI010000003.1
gtcctttagcgtatagacgaacatcgtcttgtcgggcgcttagccagacactaagttattggaaggtttatgaggttgcggtaggaataatcctccgccgctccatgccttgcatctcgcggcggaggattatccccaccgcatccttaagtaaagggca

SEQ ID NO: 17050 - RNA, 160 nt, Enterobacter sp.
  source 1..160: mol_type = other RNA; note = Related to NZ_LRCR01000003.1
gtcctttagcgtttagacgttttgcgtcttgtcgggtgattagccagacacaaagttattggaaggtttatgaggttgcggtaggtataatcctccgccgctcatggccttgcatttcgcggcggaggattatacccaccgcatccttaagtaaaggaca

SEQ ID NO: 17051 - RNA, 161 nt, Proteus mirabilis
  source 1..161: mol_type = other RNA; note = Related to JADSTR010000010.1
gtcctttagcgtgtagacgcttttcgtctagtcgggtgcttagccagacactaatttattgagtagtttttggggttgcggtaggtgtagttcaccgccgctccatcgctacgcatttcgcggcggtgaactacacctaccgcatccttaagtaaaggaca

SEQ ID NO: 17052 - RNA, 167 nt, Methylovulum psychrotolerans
  source 1..167: mol_type = other RNA; note = Related to JAGVVN010000001.1
tctctttagagttttagaactaatcgcatattagtttagtcgggtgtttagccagactctaatttattgagtcgttttaggggcgcggaagctatttttcgcgcttctttcacttcttcgttcaaaaagcgcgaaaaatagcttccgctttatcaaggtaaagagat

SEQ ID NO: 17053 - RNA, 172 nt, unidentified
  source 1..172: mol_type = other RNA; note = Related to JAATWI010000006.1; note = Methylococcaceae bacterium WWC4
tctctttagcgttttagaactaatcaagtattagtttagtcgggtgtttagccagactctaacttattgagtcgttttaggggcgcggaagctatttttcgcgcttttcgtactcattctattcctccaaaaagcgcgaaaaatagcttccgctttatcaaggtaaagagat

SEQ ID NO: 17054 - RNA, 167 nt, unidentified
  source 1..167: mol_type = other RNA; note = Related to WTAZ01000264.1; note = Methylococcaceae bacterium
actctttagtgttttggattaataattttttgatctagtcgggcgtttagccagactcaaatttattgagtggttttaggttgcgaaatacattttctgcgcttcttaaactcattcttcatttcagaagcgcagaaaacatattccgcttcctttagtaaagagtt

SEQ ID NO: 17055 - RNA, 153 nt, Pseudoalteromonas sp.
  source 1..153: mol_type = other RNA; note = Related to JACJDY010000010.1
actctttagcgtttttgagctgcttttcagcttagtcgggcgatacgccagactgtaatttattgaacggtattatgaatgcgaaagcctcgcatttattatctcgttcctcaataagaaatgcgagaccttcgctttcttaagtaaagagtc

SEQ ID NO: 17056 - RNA, 155 nt, Shewanella sp.
  source 1..155: mol_type = other RNA; note = Related to JAHKQX010000026.1
actctttagcgttttagagctaatttttttggcttagtcgggcgatacgccagactgtaatttattgaacgacattatgaatgcgaaggtctcgcatttcatatttcgttcctcaataagaaatgcgagaccttcgctttctttagtaaagagta

SEQ ID NO: 17057 - RNA, 182 nt, Ketobacter sp.
  source 1..182: mol_type = other RNA; note = Related to RCHN01000034.1
gccctttagcgttttagactaccaagaatctagtctagtcgggcgtttagccagactcaaaattattgcgtggcattgctgttgcggaagatgattttatattttccccactcctttcgctttgcagctccagtcgcggagaaaatataaaatcatcttccgcggcatcttagtaaagggca

SEQ ID NO: 17058 - RNA, 176 nt, Reinekea marinisedimentorum
  source 1..176: mol_type = other RNA; note = Related to NZ_SLZR01000017.1
actctttagtgttattggacctacagtactttcggtctagtcgggcgtttagccagactcaaacttattgattaagattatgattgcggggttaaggctttgccctgattccctctctcattcttcgctcgggaatcagggcaaagccttaaccccgcggcctctagtaaagggtt

SEQ ID NO: 17059 - RNA, 171 nt, Serratia sp.
  source 1..171: mol_type = other RNA; note = Related to NZ_CAJCKX010000049.1
gctctttagcgttggacatttttgtctagtcgggcgtttagccagactctaacttattgaacaggtttatgattgcgatacagaaaacatcgcatcataaactcacctcccttggcggtcggttcatttatgatgcgatgttttctgtatcgcagcttctagtaaagggca

SEQ ID NO: 17060 - RNA, 170 nt, Providencia rettgeri
  source 1..170: mol_type = other RNA; note = Related to AP022371.1
gctctttagcgttagacatttttgtctagtcgggcgcttagccagactctaacttattgaacaggtttatgattgcgatacagaattcatcgcgtcataaacagacctccgatgacgtcggttcatttatgacgcgatgaattctgtatcgcggcttctagtaaagagta

SEQ ID NO: 17061 - RNA, 148 nt, Citrobacter freundii
  source 1..148: mol_type = other RNA; note = Related to CP058318.1
gcactttagcgttagacgattctgtctagtcgggcgttaagccagactctaacttattgaacaggtttatgattgcgatacataaaacatcgcgccataaactgacatgacgcgatgttttatgtatcgctacttttagtaaagggca

SEQ ID NO: 17062 - RNA, 185 nt, unidentified
  source 1..185: mol_type = other RNA; note = Related to JABSOI010000029.1; note = Alteromonadaceae bacterium
gctctttagcgtttggacttattttgttgtctaaaacacaatattagtctagtcgggcgttttgccagactcaaacttattgaacgattttatggtgcgaaacctttttatagatcaggttcgtacctcgttcctcgctacaaacctgatctataaaaaggtttcgcttcctttagtaaagagtt

SEQ ID NO: 17063 - RNA, 171 nt, Alteromonas stellipolaris
  source 1..171: mol_type = other RNA; note = Related to NZ_CP014322.1
gctctttagtgttttcggacgaaatacgtctagtcgggtgtttagccagactcaaatttattgagccctctggggttgcgaattactcctgccctcggaggagttctaaagtgcgcaagcgcacccactcctccgagggcaggagtaattcgctgcgtctagtaaagagca

SEQ ID NO: 17064 - RNA, 146 nt, Aeromonas dhakensis
  source 1..146: mol_type = other RNA; note = Related to NZ_CDBH01000035.1
gctctttagtgttggacacattgtctagtcgggtgattagccagactctaatttattgagcagattaggttgcgaaagactcgcattcctatttccgcttcgctgcactaggaatgcgagtctttcgcttcctttagtaaagagcc

SEQ ID NO: 17065 - RNA, 160 nt, Aeromonas hydrophila
  source 1..160: mol_type = other RNA; note = Related to NZ_CP027804.1
gctctttagcgtatggacgatttcgtctagtcgggtgtttagccagactcaaatttattgaacagatttatggttgcgaaagcatcgcatacctagatccgttccgcttcgcttcactgttctaggtatgcgatgctttcgcttcctttagtaaagagca

SEQ ID NO: 17066 - RNA, 151 nt, Pectobacterium versatile
  source 1..151: mol_type = other RNA; note = Related to QEKR01000001.1
gctctttagcttatggctcagtataaaagccttgtcgggcgcttcgccagacaccaacttattgaacgacaatgtggttgcgaaagtctcgcgccccaagctcgttaactcacttaggtcgcgagactttcgcttcctctagtaaagagtg

SEQ ID NO: 17067 - RNA, 152 nt, Lelliottia amnigena
  source 1..152: mol_type = other RNA; note = Related to JAENMV010000007.1
gctctttagcttatggctctgtattaaaagccttgtcgggcgtttcgccagacaccaacttattgaacgacattgtggttgcgaaagtctcgcgacccaagctcgtcaactcacttaggtcgcgagactttcgcttcctctagtaaagagtg

SEQ ID NO: 17068 - RNA, 151 nt, Klebsiella aerogenes
  source 1..151: mol_type = other RNA; note = Related to CP002824.1
gctctttagcttgtggctcagtattaaagccttgtcgggcgcttcgccagacaccaacttattgaacgacattgtggttgcgaaagtctcgcgacccaagttcgttaactcacttaggtcgcgagactttcgcttcctctagtaaagagcg

SEQ ID NO: 17069 - RNA, 149 nt, Rahnella aceris
  source 1..149: mol_type = other RNA; note = Related to JAADJV010000002.1
accctttagctcaggctcaattcatcgggctagtcgggcgtttagccagactcaaacttattgaacgtcattttggttgcgaaagtctcgcaaccagagctcgttcctcactctggttgcgagactttcgcttccttcagtaaagggtg

SEQ ID NO: 17070 - RNA, 149 nt, Raoultella terrigena
  source 1..149: mol_type = other RNA; note = Related to NZ_CP050508.1
actctttagcttaggctcaattcatcgggctagtcgggcgtttagccagactcaaacttattgaacgtcattttggttgcgaaagtctcgcaaccagagctcgttcctcactcaggttgcgagactttcgcttccttcagtaaagagta

SEQ ID NO: 17071 - RNA, 94 nt, Vibrio sp.
  source 1..94: mol_type = other RNA; note = Related to MCYT01000164.1
ctttagcttaaggctacagtaattttagcctagtcgggcgattagccagactcaaacatattgaacgagattttgggtgcgaaagcacataaag

SEQ ID NO: 17072 - RNA, 169 nt, Vibrio owensii
  source 1..169: mol_type = other RNA; note = Related to CP030798.1
gctctttagcttatggctacaattatttagcctagtcgggcgattagccagactcaaacttattgaacgagaatttgggtgcgaaagcacataaagcatcgcgccctgacctcgttcctcgttcagggcgcgatgctttatgtactttcgcttcctttagtaaagagta

SEQ ID NO: 17073 - RNA, 151 nt, Grimontia hollisae
  source 1..151: mol_type = other RNA; note = Related to NZ_UGHC01000001.1
gctctttagctttaggcttaccagtcttagcctagtcgggcgattagccagactcaaatttattgaacgagattttggttgcgaaagcatcgcaccctaagctcgttcctcacttagggtgcgatgctttcgcttcctccagtaaagagtc

SEQ ID NO: 17074 - RNA, 167 nt, Vibrio tritonius
  source 1..167: mol_type = other RNA; note = Related to NZ_AP014635.1
gctctttagcttgtggctcaaattttagcctagtcgggcgattagccagactcaaacttattgaacgggtttttgggtgcgaaagcacataaagctttacgccccgctctcgttcctcgtttggggcgtaaagctttatgcactttcgcgtcctctagtaaagagct

SEQ ID NO: 17075 - RNA, 146 nt, Vibrio cholerae
  source 1..146: mol_type = other RNA; note = Related to CP036500.1
gctctttagctttgggcttaattttcggcctagtcgggtgattagccagactcaaacttattgaacgagattttggttgcgaaagcatcgcgaccaatactagttcgtattggtcgcgatgctttcgcttcctctagtaaagagca

SEQ ID NO: 17076 - RNA, 152 nt, Vibrio crassostreae
  source 1..152: mol_type = other RNA; note = Related to NZ_SLWI01000001.1
actctttagcgtttgggtgaaatttgatttacctagtcgggcgattagccagactgaaatttattgaacgggtttttggttgcgaaagcatcacatcctaaactcgttcctcatttaggatgtgatgctttcgcttcctctagtaaagggta

SEQ ID NO: 17077 - RNA, 153 nt, Aliivibrio fischeri
  source 1..153: mol_type = other RNA; note = Related to JAJVEH010000001.1
actctttagcgttcgggttaaatattaatttacctagtcgggcgattagccagactgaaacttattgaacgggtttttgggtgcgaaagcatcacatcctaaattcgttcctcatttaggatgtgatgctttcgcttcctctagtaaagggtt

SEQ ID NO: 17078 - RNA, 190 nt, Shewanella sp.
  source 1..190: mol_type = other RNA; note = Related to NZ_JWGX01000025.1
gctctttagcgttttgggcttttaaggtgttcaatgatcaatctaatcagcctagtcgggtgtatagccagactgaaacttattgaacgggatttaggttgcgaaagcaagaaattgctacgttgcctaaatcttagtcgatttaggcaacgtagcaatttcttgctttcgcttcctccagtaaagagca

SEQ ID NO: 17079 - RNA, 168 nt, Enterobacter ludwigii
  source 1..168: mol_type = other RNA; note = Related to NZ_CP041062.1
gctctaaacgtgtatggcatatttagttatgcttgtcgggcgcttagccagacactttcatattgaacggctttagggttgcgcttggtgtgcctctggattgcactcctagtttcacgtcgtcgcgcaatccagaggaacaccaagcgcttcctctaggtaagagct

SEQ ID NO: 17080 - RNA, 168 nt, Leclercia sp.
  source 1..168: mol_type = other RNA; note = Related to NZ_CP031104.1
gctctaaacgtgtgtggcatatttagttatgcttgtcgggcgcttagccagacactttcatattgaacggcattagggttgcgcttggtgtgcctctggattgcactcctagctgcacgtcgtcgcgcaatccagaggaacaccaagcgcttcctctaggtaagagct

SEQ ID NO: 17081 - RNA, 168 nt, Mangrovibacter yixingensis
  source 1..168: mol_type = other RNA; note = Related to NZ_JAIVKM010000013.1
gctctaaacgtgtatggcatatttagttatgcttgtcgggcgcttagccagacacttttatattgaacggctttagggttgcgcttggtgtgcctctggattgcactcctagttgcacgtcgtcgcgcaatccagaggaacaccaagcgcttcctctaggtaagagca

SEQ ID NO: 17082 - RNA, 166 nt, Providencia rettgeri
  source 1..166: mol_type = other RNA; note = Related to NZ_JAAQVP010000001.1
gctctaacgtgtatggcatattcagatatgctggtcgggcgtttagccagacactttaatattgaacggctttagggttgcgcttggtgtgcctctggattgcactcctcgcaagcatcctcgcgcaatccagaggaacaccaagcgcttcctctaggtaagagca

SEQ ID NO: 17083 - RNA, 157 nt, Shewanella sp.
  source 1..157: mol_type = other RNA; note = Related to JAKUDL010000001.1
actctttagcttctggacttctaaagtctagtcgggcgattagccagactgttaactattgagcacacttaggccgcgttataaagaattacgccgatcctgagcttgtgctcaagatcggcgtaattctttataacgcttcctttagtaaagagta

SEQ ID NO: 17084 - RNA, 154 nt, Hydrogenovibrio sp.
  source 1..154: mol_type = other RNA; note = Related to WBJR01000006.1
gctctttagcgttgtagcttacttaattttgctatgtctgtcgattcgacggaccctaacttattgagtgtttttggtgggcgaaagaattaatttctttcgtgcctaaagtcactcaagaaattaatttttcgccccattagtgtaaagagcc

SEQ ID NO: 17085 - RNA, 158 nt, Shewanella morhuae
  source 1..158: mol_type = other RNA; note = Related to NZ_UGYV01000001.1
tctctttagcgtttcgggctttaattttgcctagtcgggcgtttcgccagacactaacttattgaggtcacttgggagcaccagcaaactttctgctgagcctttcgtacctcaaggatcaccagaaagtttgctggtgcctcctttagtaaagagag

SEQ ID NO: 17086 - RNA, 162 nt, Glaciecola sp.
  source 1..162: mol_type = other RNA; note = Related to PJAR01000040.1
tctctttagcgtttagagtcggtttacgacttagtcgggcgattagccagacacaaatttattgagtatattggatgcgttaggaaactttctttcggttcctgctcgcaagctcactaggatccgaaataaagtttcctaacgcctactaagtaaagagat

SEQ ID NO: 17087 - RNA, 162 nt, Bowmanella pacifica
  source 1..162: mol_type = other RNA; note = Related to NZ_BMLS01000007.1
actctttagcgtttaggctgttgaaattttaagccttgtccggcgattcgccagacacaaacttattgagcacatctgggctgcgttagatatttatctaccgatccttcgtgcctcaggagcggtagataaatatctaacgcttcctctgagtaaagagtt

SEQ ID NO: 17088 - RNA, 161 nt, Shewanella aestuarii
  source 1..161: mol_type = other RNA; note = Related to BMOT01000001.1
actctttagcgtttaggctgtttaaattcacggcttgtccggcgattcgctagacacaaatttattgagcacatttgggctgcgttagatatttatctaccgatccttcgtgcctcaggagcgatagataaatatctaacgcttcctttgagtaaagagtg

SEQ ID NO: 17089 - RNA, 159 nt, Pseudoalteromonas sp.
  source 1..159: mol_type = other RNA; note = Related to JADYXE010000008.1
actctttagcgtttaggcgaatattatctgccttgtctggcgtttcgctagacacaaatttattgagcacatttgggctgcgttagatatttatctaccgatccttcgtgcctcaggagcgatagataaatatctaccgcttcctctgagtaaagagtt

SEQ ID NO: 17090 - RNA, 162 nt, unidentified
  source 1..162: mol_type = other RNA; note = Related to PGZF01000002.1; note = Gammaproteobacteria bacterium HGW-Gammaproteobacteria-15
actctttagcgtttaggctgttgtaaattactgccttgtccggcgtttcgctagacactaaattattgagcacatttgggctgcgttagatatttatctaccgatccttcgtgcctcacgagcggtagataaatatctaacgcttcctctgagtaaagagtt

SEQ ID NO: 17091 - RNA, 159 nt, Klebsiella oxytoca
  source 1..159: mol_type = other RNA; note = Related to NZ_CP027426.1
actctttagcgttaggctttgatttatagccttgtcgagcgtttcgccagacactaacttattgagtacttttagggttgcgctagaaagttttctaccgatcctagaagtctctaggatcggtagaaaactttctagcgcctcctctagtaaagagta

SEQ ID NO: 17092 - RNA, 164 nt, Acerihabitans arboris
  source 1..164: mol_type = other RNA; note = Related to NZ_WUBS01000016.1
actctttagcgttacgggccttttttagccttgtcgggcgattcgccagacactaacttattgagcacatttagggttgcgctagatacgaatctaccgatcctagattgctgcgcatcaaggatcggtagattcgtatctagcgcctcctttagtaaagagtg

SEQ ID NO: 17093 - RNA, 167 nt, Methylomonas methanica
  source 1..167: mol_type = other RNA; note = Related to NZ_LUUH01000065.1
gctctttagcgttttgactatgttctctattaatagtcttgtctggcgattcgccagacactaacttattgttgacatttaggttgcgttagaaaattttctaccgctcctccgtgtcctccggatcgctagaaaattttctaacgcccccttaaatgtaaagagta

SEQ ID NO: 17094 - RNA, 163 nt, Aliivibrio fischeri
  source 1..163: mol_type = other RNA; note = Related to MAJP01000040.1
gctctttagcgtttgggctaaataaatatttacgccttgtctggcgtttcgctagacactaacttattgggtacatttaggttgcgttagaaaattttctaccgatccttcgtacctcaggagcgatagaaaaccttctaacgctggcctctagtaaagagtt

SEQ ID NO: 17095 - RNA, 133 nt, Haemophilus haemolyticus
  source 1..133: mol_type = other RNA; note = Related to LZOY01000008.1
actctttagcgtataagcaatttgctttgtcaggcgtttcgctagaccctaacttattgattagatttaggttgcgttagaaaaatttctgacnngtcagaaatttttctaacgcggccttaagtaaagagta

SEQ ID NO: 17096 - RNA, 143 nt, Pasteurella multocida
  source 1..143: mol_type = other RNA; note = Related to NZ_CP028926.1
actctttagtgtttaagcatttgctagtcgggcgtttcgctagactctaacttattgagaggatttggctgcgttagaatattttcagccgatccttgcaggagcagctgaaaatattctaacgcttccttaagtaaagagta

SEQ ID NO: 17097 - RNA, 145 nt, Haemophilus parainfluenzae
  source 1..145: mol_type = other RNA; note = Related to NZ_CP063116.1
actctttagcgtataagcaatttgcttagtcgggcgtttcgctagacacaaacttattgattagatttaggttgcgttagaaaatttctgacgatcctaaatcggagcgtcagaaattttctaacgcggcctttagtaaagagat

SEQ ID NO: 17098 - RNA, 150 nt, Cricetibacter osteomyelitidis
  source 1..150: mol_type = other RNA; note = Related to NZ_SLYB01000005.1
actctttagcgtttgtaagcaaattgctcagtcaggtgtttagctagactcaaatttattgattagatttaggatgcgttagaaaattttctatcgatcctggattcggagcgatagaaaattttctaacgcggcctttagtaaagagta

SEQ ID NO: 17099 - RNA, 161 nt, Aeromonas media
  source 1..161: mol_type = other RNA; note = Related to NZ_AP022188.1
actctttagcgtttgggctttgttttaaatagccttgtcaggcgattcgccagacactaatttattgagcacatttagggttgcgaaagatgcttttcttccgatccttcgtgcctcacgagcggaagaaaagcatctttcgcctcctttagtaaagagtt

SEQ ID NO: 17100 - RNA, 160 nt, Aeromonas veronii
  source 1..160: mol_type = other RNA; note = Related to NZ_AP022264.1
actctttagcgttttggcttcgttatacaagccttgtcgggcggttcgctagacacaaatttattgagcacatttagggttgcgaaagatgcatttcttccgatccttcgtgcctcacgagcggaagaaatgcatctttcgcctcctttagtaaagagtt

SEQ ID NO: 17101 - RNA, 159 nt, Aeromonas enteropelogenes
  source 1..159: mol_type = other RNA; note = Related to NZ_JMGO02000012.1
actctttagcgtatgggctttcatttttagcctagtcgggcgattcgctagactcaaatttattgagcacatttagggttgcgaaagatgtatgtcttccgatccttcgtgcctcacgatcggaagacatacatctttcgcttcctttagtaaagagtt

SEQ ID NO: 17102 - RNA, 177 nt, Alteromonas flava
  source 1..177: mol_type = other RNA; note = Related to NZ_PEAX01000003.1
actctttagcgttttggacttgttgacttccaaaagtgtcaatatacgtcttgtctggcgtttcgccagacactaatttattgggtacatttagggttgcgaaagatacttttctcacgatccttcgtccctcacgagcgtgagaaaactatctttcgcttccgacagtaaagagtg

SEQ ID NO: 17103 - RNA, 159 nt, unidentified
  source 1..159: mol_type = other RNA; note = Related to DQNK01000125.1; note = Gammaproteobacteria bacterium
actctttagcgtacaggcttgcggttatagcctagtctggcgtttcgccggacacaaatttattgagcacatttagggttgcgaaagatgtatttcttccgatccctcgtgcctcgcgagcggaagaaatacatctttcgcttcctctagtaaagagtg

SEQ ID NO: 17104 - RNA, 168 nt, Alishewanella sp.
  source 1..168: mol_type = other RNA; note = Related to JAEINI020000025.1
ccttttacgcgtttaggcaatatagtcttaatttgacaaagcctcgtccggcgtttcgctcgacttacgtttattgaacacttttagggttgcgctaaagcacttctgtcaagatccactgaagtggaacatgccagaagtcttcagcgcagcctctaggtaaaagga

SEQ ID NO: 17105 - RNA, 173 nt, Acinetobacter sp.
  source 1..173: mol_type = other RNA; note = Related to NZ_CP055277.1
tctctttagtttttttataaattcgactatctttctttgatagaaaattttataaaagtttagcgtttcgctaaactaacgttattgtgagaaatttaggataccattagatgaatttcttcgtacctaaagttacttagaaattaatctaacgctatcctgagtaaagagat

SEQ ID NO: 17106 - RNA, 165 nt, Acinetobacter sp.
  source 1..165: mol_type = other RNA; note = Related to MVON01000005.1
tctctttagcctttttataaaacgaactattttgggtagttttataaaagtttagcgtttcgctaaactaatgttattgtgagaaatttaggcttgcgttagatgaatttctgcgcacctaaaggagcttagaaattcatctaacgctatcctgagtaaagagat

SEQ ID NO: 17107 - RNA, 170 nt, Acinetobacter bereziniae
  source 1..170: mol_type = other RNA; note = Related to JADWNN010000006.1
tctctttagccttttttataaaactaactatccttatggataagttttgtaaaagtttagcgattcgctaaattaatgttattgtgagaaatttaggtttgcgttagatgaatttctgcgcgcctaaaggagcttagaaattcatctaacgctatcctgtgtaaagagat

SEQ ID NO: 17108 - RNA, 174 nt, Acinetobacter baumannii
  source 1..174: mol_type = other RNA; note = Related to DADAZD010000003.1
atcctttagcgttatttaagttgactaatacgttagtaacttaaatagtttggcgtttcgccaaacttaatttgattgtgaccatttagggttgcgctaatcaaatttttcttcatacggcttagtcgcctgtactcagaaaaattagattaccgcatccctgtgtaaaggatt

SEQ ID NO: 17109 - RNA, 167 nt, Acinetobacter seifertii
  source 1..167: mol_type = other RNA; note = Related to NZ_CP061828.1
ttcctttagcgtaatttaagttcactaattttttagtaacttaaatagtttggtgtttcgccgaactctatttgattgtgaccatttagggttgcgctaattaaattttcttcatacgtctcgccgtattcagaaaattcaattaccgcatccctgtgtaaagaaat

SEQ ID NO: 17110 - RNA, 155 nt, Acinetobacter sp.
  source 1..155: mol_type = other RNA; note = Related to NEGC01000003.1
actctttagctttatttaggttactaaaacctaaatagttcggcgtttcgccgaactctaatcgattgtcaacttctagggttgcgctaattccctttttcctcatcctaaaggaatcggaaaaatgaaattaccgcatccctgtgtaaagagtt

SEQ ID NO: 17111 - RNA, 179 nt, Providencia rettgeri
  source 1..179: mol_type = other RNA; note = Related to NZ_JAGKLI010000001.1
acctttacgcgtaggataactcattttatccttgtcgggcgtttcgccagacactaatttattgtggacatttagggttgcgcttcagcacttttagccagatcctgaatgccactcgcaggcttcgtgtccttcaggagctgtctaaaagtctaaagcgcatcctttaggtaaaggta

SEQ ID NO: 17112 - RNA, 178 nt, Proteus mirabilis
  source 1..178: mol_type = other RNA; note = Related to CP049941.1
acctttacgcgtgggataacttattaatccttgtcgggcgtttcgccagacactaatttattgtgaacatttagggttgcgctttagcacttttagccagatcctgaatttcactgcgcaggcttgttccattcaggagccgtctaaaagtctaaagcgcatcctttaggtaaaggac

SEQ ID NO: 17113 - RNA, 170 nt, Salmonella enterica
  source 1..170: mol_type = other RNA; note = Related to CP074281.1
gcctttacgcgtgggataactggtttatccttgtcgggcgtttcgccagacactaatttattgtggacatttagggttgcgctttagcactttcagcaagatccttcatgccactgcgtttcattcaggagcttgctgaaagtctaaagcgcatcctttaggtaaagggg

SEQ ID NO: 17114 - RNA, 171 nt, Klebsiella quasipneumoniae
  source 1..171: mol_type = other RNA; note = Related to NZ_CP033901.1
acctttacgcgtgggataacaggtttatccttgtcgggcgtttcgccagacactaacttattgtggacatttagggttgcgcttcagcactttcagcaagatccttcattccactgcgtttcatttcaggagcttgctgaaagtctaaagcgcatcctttaggtaaagggg

SEQ ID NO: 17115 - RNA, 171 nt, Pantoea stewartii
  source 1..171: mol_type = other RNA; note = Related to NZ_CP049115.1
gcctttacgagtgggataaaagttttatccttgtcgggcgtttcgccagacactaacttattgtggacatttagggttgcgctttagcactttcagcaagatccttcattccactacgttacatttcaggagcttgctgaaagtctaaagcgcatcctttaggtaaaggtc

SEQ ID NO: 17116 - RNA, 173 nt, Escherichia coli
  source 1..173: mol_type = other RNA; note = Related to ABCQBJ010000001.1
acctttacgcgtgggataacaaatggtttatccttgtcgggcgtttcgccagacactaatttattgtggatatttagggttgcgcttcagcactttcagcaagatccttcattccactgcgtttcattcaggagcttactgaaagtctgaagcgcatcctttaggtaaaggat

SEQ ID NO: 17117 - RNA, 170 nt, Dickeya sp.
  source 1..170: mol_type = other RNA; note = Related to NZ_CP023484.1
gcctttacgcgtgggataatctttttatcctagtcgggcgtttcgccagactctaacttattgtggatatttagggttgcgcttcagcactttcagcaagatccttcattccactgcgtttcattcaggagcttactgaaagtctgaagcgcatcctttaggtaaagggt

SEQ ID NO: 17118 - RNA, 170 nt, Dickeya undicola
  source 1..170: mol_type = other RNA; note = Related to RJLS01000002.1
gcctttacgcgttgggataatgttttatcctagtcgggcgtttcgccagactctaatttattgtggacatttagggttgcgcttcagcactttcagcaagatccttcattccactgcgtttcattcaggagctcactgaaagtctgaagcgcatccttcaggtaaaggat

SEQ ID NO: 17119 - RNA, 169 nt, Pluralibacter gergoviae
  source 1..169: mol_type = other RNA; note = Related to JZYL01000045.1
ctctttacgcgtgggatatttttatcctagtcaggcgtttcgccagactctaacttattgtggatttctagggttgcgcttcttagtttgagcgggatcctgctctccactcagtcgtttcgtttaggatcccgctcaaactaagaagcgcatcctctaggtaaagggt

SEQ ID NO: 17120 - RNA, 169 nt, Citrobacter braakii
  source 1..169: mol_type = other RNA; note = Related to JADVIA010000001.1
ctctttacgcgtgggatatttttatcctagtcgggcgtttcgccagactctaacttattgtgaatatctagggttgcgcttcgtcgtttgagcgggatcctgcattccactaagtcgttccaattaggatcccgctcaaacgaagaagcgcatcctctaggtaaagggt

SEQ ID NO: 17121 - RNA, 160 nt, Serratia marcescens
  source 1..160: mol_type = other RNA; note = Related to MVGB01000005.1
ctctttacgcgtgggatatattatttgttatcctagtcgggcgattagccagactctaacttattgcgaataattgggttgcgctaaatacttttggcacgatcctgagcaagcacaggagcgcgccaaaagtatttagcgcatcctctaggtaaagaga

SEQ ID NO: 17122 - RNA, 157 nt, Yersinia kristensenii
  source 1..157: mol_type = other RNA; note = Related to NZ_CABHXL010000034.1
ctctttacgcgtgggatatttatccttgtccggcgattcgccagacactaatttattgcgaacatttagggttgcgcttaagcacttttggcacgatccttcgctaatcactcaggaatgtgccaaaagtctgaagcgcatcctctaggtaaagaga

SEQ ID NO: 17123 - RNA, 160 nt, Rahnella variigena
  source 1..160: mol_type = other RNA; note = Related to NZ_CACSJK010000006.1
ctctttacgcgaagggtaacttagttattatccttgtcgggcgtttcgccagactctaacttattgcgtgtgattgggttgcgctaaatacttttggcacgatccttcgcgcactcaggagcgcaccaaaagcatttagcgcatcctctaggtaaaggga

SEQ ID NO: 17124 - RNA, 162 nt, Enterobacter cloacae
  source 1..162: mol_type = other RNA; note = Related to JAJFTC010000002.1
ctctttacgcgaaggataacaatcaggttaatccttagtcgggcgtttcgctagactctaacttattgcgtgtgattgggttgcgctaaatgcttttggcacgatccttcacaagctcaggagcgcaccaaaagcatttagcgcatcctctaggtaaaggga

SEQ ID NO: 17125 - RNA, 160 nt, Pantoea agglomerans
  source 1..160: mol_type = other RNA; note = Related to JPOT02000001.1
ctctttacgcgaaggataccaaacggtttatccttgtcgggcgtttcgccagactctaacttattgcgtgtgattgggttgcgctaaatacttttggcacgatcctgcgcaagcttaggagcgcaccaaaagcatttagcgcatcctctaggtaaagaga

SEQ ID NO: 17126 - RNA, 154 nt, Pectobacterium odoriferum
  source 1..154: mol_type = other RNA; note = Related to NZ_CP034938.1
atctttacgcgtgggtttatagtattaaacctagtcgggcgattagccagacatacagtattgaggacacttagggttgcgcaaaagcacttctctaacgatccttaatcaggagcgtcagagaagtcttttgcgcatcctctaggtaaagatt

SEQ ID NO: 17127 - RNA, 155 nt, Citrobacter braakii
  source 1..155: mol_type = other RNA; note = Related to JADVFW010000007.1
atctttacgcgaaggtttatgttacttaaacctagtcgggcgattagccagacatacagtattgaggacacttagggttgcgcaaaagcacttctctaacgatccttgatcaggagcgtcagagaagtcttttgcgcatcctctaggtaaagatt

SEQ ID NO: 17128 - RNA, 153 nt, Pantoea ananatis
  source 1..153: mol_type = other RNA; note = Related to JAKZMT010000006.1
atctttacgcgtgggtttaaagaattaaacctggtcgggcgattagccagacatctagtattgaggacacttagggttgcgcaaaagcacttctctaacgatccttggcaggagcgtcagagaagtcttttgcgcatcctttaggtaaagatc

SEQ ID NO: 17129 - RNA, 156 nt, Serratia fonticola
  source 1..156: mol_type = other RNA; note = Related to JAAAXN010000025.1
atctttacgcgtgggtttataagttagtaagcctggtcgggcgataagccagacatacagtattgaggactcttagggttgcgcaaaagcacttctctaacgatccttaatcaggagcgttagagaagtcttttgcgcatccttcaggtaaagata

SEQ ID NO: 17130 - RNA, 161 nt, Vibrio sp.
  source 1..161: mol_type = other RNA; note = Related to NZ_CP049914.1
tcctttacgcgttggttttgttacaaacagaacttgtcgggcgcatcgccagacagtaatttattgtggacatttagggttgcgcttcagcactttccgcacgatccttcgttcctcaggagcgcacgaaaagtcttcagcgcctcctttaggtaaaggca

SEQ ID NO: 17131 - RNA, 159 nt, Vibrio europaeus
  source 1..159: mol_type = other RNA; note = Related to NZ_CP053541.1
tcctttacgcgtggttttgtatgtacaaaacttgtcgggcgtatcgctagacagtaatttattgaggatatttagggttgcgcttcagcactttccgcacgatccttcgttcctcaggagcgcacgaaaagtcttcagcgcatccttaaggtaaaggtt

SEQ ID NO: 17132 - RNA, 162 nt, Aeromonas encheleia
  source 1..162: mol_type = other RNA; note = Related to NZ_LR134376.1
gcctttacgcgtgggttttgtcattgtacaaaccttgtcaggcgattcgccagacagtaacttattgtggacatttagggttgcgcttcagtactttccgcacgatccttcgtccctcaggagcgcacgaaaagtcttcagcgcatcctttaggtaaaggtt

SEQ ID NO: 17133 - RNA, 164 nt, Pseudoalteromonas sp.
  source 1..164: mol_type = other RNA; note = Related to CP001796.1
ctctttacgcgtgggataacgcacaacagtttatccttgtcgggcgattagccagacactattttattgaaggtatttagggttgcgctaaagcacttctctaaagatccttcgttcctcaggagcgttagagaagtcttcagcgcatcctctaggtagagaga

SEQ ID NO: 17134 - RNA, 164 nt, Vibrio parahaemolyticus
  source 1..164: mol_type = other RNA; note = Related to NZ_CAJOAG010000011.1
ctctttacgcgtgggataacgcaaaacagtttatccttgtcgggcgattagccagacactaacttattgaaggtatttagggttgcgctaaagcacttctctaaagatccttcgttcctcaggagcgttagagaagtcttcagcgcatcctctaggtaaaggga

SEQ ID NO: 17135 - RNA, 185 nt, Vibrio splendidus
  source 1..185: mol_type = other RNA; note = Related to MCWA01000032.1
ctctttacgcgtaagatagcaaacagtttgtttatctttgtcgggcgtttcgctagacactaacttattgagaacatttagggttgcgctgaagcactttcagtaggatccttcgctctccctcgtacctcggtcgcgctcacgagcctactaaaagtctccagcgcatcctctaggtaaagagt

SEQ ID NO: 17136 - RNA, 185 nt, Photobacterium carnosum
  source 1..185: mol_type = other RNA; note = Related to WMDC01000029.1
ctctttacgcgtaagataacaaacgatttgtttatctttgtcgggcgtttcgctagacactaacttattgagaacatttagggttgcgctaaagcactttaagcaagatccttcgctctccctcgtacctcggtcgcgctcacgagctcacttaaagtctccagcgcatcctctaggtaaagagt

SEQ ID NO: 17137 - RNA, 176 nt, Vogesella alkaliphila
  source 1..176: mol_type = other RNA; note = Related to NZ_BMYW01000013.1
atctttacgcgtaggatactgctctatatttattttgagttgcttatcctgtctggcgtttcgtccagacatatgttattgacgatttttagggttgcgctaaagcacttccctatcgatccttcgtacctcaggagcgctagggaagtctttagcgcatcctttaggtaaagata

SEQ ID NO: 17138 - RNA, 175 nt, unidentified
  source 1..175: mol_type = other RNA; note = Related to JACYUE010000003.1; note = Oxalobacteraceae bacterium
taccttacgcgtagggcagattcgtagttggttgcatttgtccttgtcgggcgattagccagacacaaatttattgaggatatttaggttgcgtcaagagctcgcctaacgatccttcgaaaccccacctcaggagcgttagtcaatctcttaacgcatcctttaggtaaggaaa

SEQ ID NO: 17139 - RNA, 166 nt, Massilia violacea
  source 1..166: mol_type = other RNA; note = Related to NZ_JACHXD010000002.1
taccttacgcgtgggacagatttattttttgtccttgtcgggcgtttagccagacacgaatttattgaggatatttaggttgcgttaaaggcttgcctaacgctccctcgataccccacctcgcgatcgttagtcaagcctttaacgcatcctttaggtaaggaaa

SEQ ID NO: 17140 - RNA, 176 nt, Alcaligenes sp.
  source 1..176: mol_type = other RNA; note = Related to JAKUDK010000002.1
ttccttacgcgttgggacagattctgaatcgacaatatttgtccttgtcgggcgtttagccagacactcatttattgaggatatttaggttgcgtcaaacgcgcgcttaacgatccttcgaaaaagcacctcaggagcgttaagcgcgcgtttgacgcatccttaaggtaaggaaa

SEQ ID NO: 17141 - RNA, 165 nt, Massilia sp.
  source 1..165: mol_type = other RNA; note = Related to NZ_CP086370.1
ctctttacgcgcggggttagtagatactttacgtaatccttgtcgggcgcttagccagacactaatttattgaggacacttaggttgcgttaaatgctttcctaacgatccttcgtgcctcaggagcgttaggaaaccctttaacgcctcctttaggtaaagagt

SEQ ID NO: 17142 - RNA, 178 nt, Janthinobacterium lividum
  source 1..178: mol_type = other RNA; note = Related to NZ_CP048832.1
tactttacgtgtgggatacattccttcataagaatttgtccttgtcgggcgcttcgctagacactaatttattgcggatatttagggttgcgttaaagacttccctatcgatccttcctccactgcgttccctcaggatcgctaggaaagcctttaacgcttcctttaggtaaagtat

SEQ ID NO: 17143 - RNA, 170 nt, Pseudomonas aeruginosa
  source 1..170: mol_type = other RNA; note = Related to DAFPVK010000010.1
ctctttacgcgttgggatatgaatggctctgtaattgatatcctggtcgggcgattcgccagaccctcacttattgaggatttttagggttgcgctaaaggcttctctatcgatccttcgttcctcaggagcgctagagaagcctttagcgcatcctctaggtaaagagt

SEQ ID NO: 17144 - RNA, 162 nt, Pseudoalteromonas sp.
  source 1..162: mol_type = other RNA; note = Related to JAKFZQ010000002.1
actctttagcgattttgggctttgacattctagcctagtcgggcgattagccagactctaacttattgagcacatctagggttgcgttatataaatttataccgatccttcgtgcctcaggagcggcataaatttatataacgcttcctctagtaaagagta

SEQ ID NO: 17145 - RNA, 162 nt, Pseudoalteromonas sp.
  source 1..162: mol_type = other RNA; note = Related to NZ_LR877185.1
actctttagcgttgggatgattccttgaattaacctagtcgggcgattagccagactctaacttattgagcacatttagggttgcgttataaagttttataacgatccttcgtgcctcaggagcgctataaaactttataacgcttcctctagtaaagagtg

SEQ ID NO: 17146 - RNA, 164 nt, Vibrio metoecus
  source 1..164: mol_type = other RNA; note = Related to NZ_LBGP01000014.1
gctctttagcgttttgggtagaatttgaattcaaccttgtcgggcgtttcgctagacactaacttattgattgtatttagggttgcgttagaacttttctaacgatccttcgtacctcaggagcgtcagagaaagttctaacgctagcctctgagtaaagagtt

SEQ ID NO: 17147 - RNA, 163 nt, Shewanella gelidii
  source 1..163: mol_type = other RNA; note = Related to BMPZ01000002.1
actctttagcgtttgggtagaataccaattcaaccttgtcgggcgattcgctagacactaacttattgagtgtatttagggttgcgttagaacttttctgacgatccttcgtacctcaggagcgtcagagaaagttctaacgctagcctctgagtaaagagta

SEQ ID NO: 17148 - RNA, 162 nt, Vibrio cholerae
  source 1..162: mol_type = other RNA; note = Related to JAEMEZ010000008.1
actctttagcgtttgggtcgaatttgaattcaaccttgtcgggcggttcgccagacactaacttattgagtgcatttagggttgcgttagaacttttctaacgatccttcgtgcctcaggagcgtcagaaaagttctaacgctagcctctgagtaaagagta

SEQ ID NO: 17149 - RNA, 161 nt, Vibrio campbellii
  source 1..161: mol_type = other RNA; note = Related to NZ_CP026321.1
actctttagcgtttgggttgataaatatcacaccttgtcgggcggttcgccagacactaacttattgagtgcatttagggttgcgttagaacttttctaacgatccttcgtgcctcaggagcgtcagaaaagttctaacgctagcctctgagtaaagagtt

SEQ ID NO: 17150 - RNA, 160 nt, Vibrio sp.
  source 1..160: mol_type = other RNA; note = Related to VHSP01000001.1
actctttagcgtttgggtcgaatttcagttcaaccttgtcgggcgattcgctagacactaacttattgagtgcatttagggttgcgttagaacttttctaacgatcctcgtgcctcggagcgccagaaaagttctaacgcgagcctctgagtaaagagtt

SEQ ID NO: 17151 - RNA, 163 nt, Shewanella sp.
  source 1..163: mol_type = other RNA; note = Related to JACJEU010000008.1
actctttagcgtattggattaagttataacttaatcttgtcgggcgtttcgccagacactaatttattgagcatatttagggttgcgttagaacgttttctaacgatccttcgttcctcaggagcgccagaaaagttctaacgctggccactagtaaagagtt

SEQ ID NO: 17152 - RNA, 163 nt, Vibrio crassostreae
  source 1..163: mol_type = other RNA; note = Related to RKQY01000017.1
gctctttagcgtattgggtcgagtgtaaactcaaccttgtcgggcgtttcgccagacactaacttattgagtgtatttagggttgcgttagaacgttttctaacgatccttcgtacctcaggagcgtcagaaaagttctaacgctagcctctagtaaagagtt

SEQ ID NO: 17153 - RNA, 162 nt, Thorsellia anophelis
  source 1..162: mol_type = other RNA; note = Related to NZ_FOHV01000012.1
accttttagcgaatatgaagtaagctttgttacttcttgtcaggcgtttcgccagactaaatcttattgattttatttagcttgcgttggagctgttttgcctatccttcgctagcttcggataggcaaaacagctccaacgctatcctaaagtaaaaggtt

SEQ ID NO: 17154 - RNA, 165 nt, Leclercia sp.
  source 1..165: mol_type = other RNA; note = Related to NZ_CP088265.1
actctttagcgtatgggctttagttatatagccttgtcgggcgtttcgccagacacgaacttattgtttacatttagggttgcgtcagatgcaaatcggccgatcctgctcgctcactcacacgatcggccgatttgcatccgccgcatcctttagtaaagagtt

SEQ ID NO: 17155 - RNA, 161 nt, Serratia marcescens
  source 1..161: mol_type = other RNA; note = Related to CP020501.1
actctttagcgtatgggcttcaatacagccttgtcgggcgtttcgccagacactaacttattgtttagatttagggttgcgtcagatgcaaatcggccgatcctgctcgttcctcacacgatcggccgatttgcatccgccgcatcctttagtaaagagtt

SEQ ID NO: 17156 - RNA, 182 nt, Pseudomonas arcuscaelestis
  source 1..182: mol_type = other RNA; note = Related to NZ_JADBHI010000015.1
ctctttacgcgttttaggagctttcgagctctagtctggtgtatagccggactctaatttattgaacggtattagttgcgacgaaggctcgcgtgggcttcactcgtcgcactcgtgccttagcactcgcactcctcgcaaatcccacgcgagccttcgccgctatatctttggtaaagaga

SEQ ID NO: 17157 - RNA, 174 nt, Pseudomonas sp.
  source 1..174: mol_type = other RNA; note = Related to NZ_CP025261.1
ctctttacgcgttttaggagctttcgagctctagtccggtgtatagccagactctaatttattgaacggtattagttgcgacgaaggctcgcgtgggcttcactcgtcgcactcgtacctcgcactcctcgcaaagcccacgcgagccttcgccgctatatcttggtaaagaga

SEQ ID NO: 17158 - RNA, 172 nt, Pseudomonas sp.
  source 1..172: mol_type = other RNA; note = Related to NZ_CP067098.1
ctctttacgcgttttggagcgcaagctctagtccggtgtatagccagactctaatttattgattggtattagttgcgacgaaggctcgcgtgggcttcactcgtcgcactcgtacctcgcactcctcgcaaagcccacgcgagccttcgccgctatatctttggtaaagaga

SEQ ID NO: 17159 - RNA, 161 nt, Pseudomonas sp.
  source 1..161: mol_type = other RNA; note = Related to DORR01000095.1
ctctttacgcgtttttggagcgcaagctctagtccggtgtatagccagactctaatttattgatcggctttagttgcgacgaaggctcgtgtgggcttcagtcgtcgttcctcctcctaaagcccacacgagccttcgtcgctatatctttggtaaagaga

SEQ ID NO: 17160 - RNA, 172 nt, Pseudomonas azadiae
  source 1..172: mol_type = other RNA; note = Related to NZ_JAHSTY010000001.1
ctctttacgcgttttggagcgcaagctctagtccggtgtatagccagactctaatttattgattggcattagttgcgacgaaggctcgcgtgggcttcactcaaagcgctcgtccctcgcactcctcgcgaatcccacgcgagccttcgccgctatatctttggtaaagaga

SEQ ID NO: 17161 - RNA, 162 nt, Pseudomonas fluorescens
  source 1..162: mol_type = other RNA; note = Related to LKEF01000044.1
ctctttacgtgttttggagcttcactgctctagtcgggtgtatagccagactctaatttattgattggctttagttgcgacgaagtcccgcgtgggcctcagtcgtcgttcctcctcctaaagcccacgcgggacttcgtcgctatatctttggtaaagagc

SEQ ID NO: 17162 - RNA, 162 nt, Pseudomonas syringae
  source 1..162: mol_type = other RNA; note = Related to FOQB01000015.1
ctctttacgtgctttggagcttcattgctctagtcgggtgtatagccagactctaacttattgattggctttagttgcgacgaagtcccgcgtgggcctcagtcgtcgttcctcctcctaaagcccacgcgggacttcgtcgctatatctttggtaaagagc

SEQ ID NO: 17163 - RNA, 161 nt, Pseudomonas shahriarae
  source 1..161: mol_type = other RNA; note = Related to NZ_CP077085.1
ctctttacgtgctttggggcttcgtgctctagtcgggtgtatagccagactctaatttattgatcggctttagttgcgacgaagtcccgcgtgggcctcagtcgtcgttcctcctcctaaagcccacgcgggacttcgtcgctatatctttggtaaagagc

SEQ ID NO: 17164 - RNA, 170 nt, Pseudomonas oryzihabitans
  source 1..170: mol_type = other RNA; note = Related to NZ_VDNQ01000002.1
ctctttacgcgtttttggagctttgattttataaggctctagtcgggtgtatagccagactcaaaattattgattggctttagttgcgacgaagttccgcggggacttcagtcgccgttccgcctcctaaagcccccgcgaaacttcgtcgctatatcttggtaaagagc

SEQ ID NO: 17165 - RNA, 160 nt, Alteromonas naphthalenivorans
  source 1..160: mol_type = other RNA; note = Related to NC_015554.1
atctttacgcgtttttatgggcttaggccctagtcgggtgtatagccagactctaatttattgattggatttagttgcgatgaatgcctatctggaattcatcttcgttcctcagctaaattccagataggcattcatcgctatatctgaggtaaagata

SEQ ID NO: 17166 - RNA, 159 nt, Shewanella algae
  source 1..159: mol_type = other RNA; note = Related to JADZHD010000030.1
atctttacgtgatttaagagcctcggctctagtcgggtgtatagccagactctaacttattgattggatttagttgcgatggatgcctatccgggattcatcttcgtccctcagctaaatcccggataggcatccatcgctatatctgaggtaaagata

SEQ ID NO: 17167 - RNA, 162 nt, Chromobacterium phragmitis
  source 1..162: mol_type = other RNA; note = Related to NZ_CP029554.1
tactttacgcgttttacgggctttaatggcctagtcgggtggatagccagactctaacttattgatcggcataggttgcgatgaaggatcggcttggtttcagccgctccttagcggccaaaaccaagccgatccttcatcgcttcattcttggtaaagagc

SEQ ID NO: 17168 - RNA, 166 nt, Hydrogenovibrio halophilus
  source 1..166: mol_type = other RNA; note = Related to NZ_KB913033.1
ctctttacgtgttaaatgagttaacgaattcatttagtcaggtgtttagccagactttagtttattgattggcattaggctgcgctgaaggctttttagccttcattacgctcctacgtcgctagaaggctaaaaagccttcagcgctgccgttgaggtaaagtgc

SEQ ID NO: 17169 - RNA, 170 nt, Thiomicrorhabdus sp.
  source 1..170: mol_type = other RNA; note = Related to JAKISK010000029.1
ctctttacgtgtttaagcattgtgtatatgttttagtctggtgtaaatcggacgcaattttattgtggacatttggccgcgcagaagtataaaaatacttcgctccacgcttgttccaatccctgcgcaaagtatttttatacttctgcgctactctcgaggtaaagagc

SEQ ID NO: 17170 - RNA, 182 nt, unidentified
  source 1..182: mol_type = other RNA; note = Related to BLYD01000277.1
ctctttacgtgttttatgaggcacaatcattaatttagtgctttagtctggcgtatagcaagactcatgtttattgagcggttttaattgcgataaagtctctttcagacttcatcgccatccgctttgctccagttgtgaagtctgaaagagactttatcgctttctttaaggtaaagagt

SEQ ID NO: 17171 - RNA, 159 nt, Pseudomonas azotifigens
  source 1..159: mol_type = other RNA; note = Related to NZ_KE384408.1
ctttttacgcgttttggtgctgttttatgcactagtcgggtgtacagccagactcaaatttattgatcggctttagttgcgacgaatgtccgtctgggcttcactcgcttcactcctaaagcccagacgaacattcgtcgcattcttttggtaaaaagc

SEQ ID NO: 17172 - RNA, 141 nt, Pseudomonas tolaasii
  source 1..141: mol_type = other RNA; note = Related to JACAOT010000014.1
ctctttacgcgtttatgtgcgcaagcactagtcgggtgtatagccagactctaagttattgatgtgatttagttgcgacggatggtcgggcgggctnnnnagcccgcccgaccatccgtcgctatatccttggtaaagagc

SEQ ID NO: 17173 - RNA, 152 nt, Methylomonas albis
  source 1..152: mol_type = other RNA; note = Related to CAJHIV010000001.1
ctctttacgcgtttatatggaaatttaagtatgtcgggcgctcagccagacccaaaattattgataagatttagttgcgcagaaggcttcttcggtcttccgcgtcgctacagcccaaagaagccttctgcgcttccttaaaggtaaagagt

SEQ ID NO: 17174 - RNA, 171 nt, Vibrio sp.
  source 1..171: mol_type = other RNA; note = Related to NZ_QLYY01000008.1
acctttacgcgtggatttgaaaaacgagaattcgttgttcaatcttgtcgggcgctcagccagacaaatgtttattgaggatatttagggctgcgcaagcatcgctttgcacgatccttcgttcctcaggagcgcacaaagcgatgcttgcgcttcctttaggtaaaggca

SEQ ID NO: 17175 - RNA, 170 nt, Vibrio hangzhouensis
  source 1..170: mol_type = other RNA; note = Related to JAHVKH010000015.1
acctttacgcgtagttttgaacaacgtactttcgttattcaatcttgtcgggcgttcagccagacacatgtttattgaggttatttaggtcgcgcaagcatcgctttgcacgatccttcgtgcctcaggagcgcacaaagcgatgcttgcgccccctttaggtaaaggca

SEQ ID NO: 17176 - RNA, 169 nt, Vibrio splendidus
  source 1..169: mol_type = other RNA; note = Related to MSCG01000002.1
acctttacgcgtggatttgaggatgcttgtcattcttgatcttgtcgggcgcttagccagacacactgtttattgaggacatttagggctgcgcaagcatagcttcgcacgatccttcgttcctcaggagcgcacgaagctatgcttgcgcttcctttaggtaaaggaa

SEQ ID NO: 17177 - RNA, 171 nt, Vibrio ziniensis
  source 1..171: mol_type = other RNA; note = Related to NZ_CP049331.1
acctttacgcgtggatactgagttgacgctgttaacttatatcttgtcgggcgtttagccagacacacagtttattgaggacatttagggctgcgcaagcttcgctttgcacgatccttcgttcctcaggagcgcacaaagcgaagcttgcgcttccttaaggtaaaggca

SEQ ID NO: 17178 - RNA, 154 nt, Vibrio cholerae
  source 1..154: mol_type = other RNA; note = Related to RHPA01000002.1
ctctttacgcgaattggggtgaaaaccctagtcgggtgtacagccagactcaaatttattgagcgggattaggtgcgctagaggcctctgcgggccccagtcgcaggctcctaaaacccgcagaggcctctagcgcttcctttaggtaaagagt

SEQ ID NO: 17179 - RNA, 154 nt, Vibrio vulnificus
  source 1..154: mol_type = other RNA; note = Related to AAXPSE010000001.1
ctctttacgcgaattggggtgaaaaccctagtcgggtgtacagccagactcaaatttattgagcgggattaggtgcgctagaggcctctgcgggccccagtcgcaagctcctaaaacccgcagaggcctctagcgcttcctttaggtaaagagt

SEQ ID NO: 17180 - RNA, 178 nt, Thalassospira xiamenensis
  source 1..178: mol_type = other RNA; note = Related to OBMM01000001.1
ctctttacgcgaggtgctttacggcacggtcaggcgtatcgccagaccctaacttattgacggtttcttggcgcgataagatggtttctttcttatcttattccgcctcgctgaccgcgcttcgtcgaaataagataagaaagaaaccatcttatcgcttcttcttaaggtatagagc

SEQ ID NO: 17181 - RNA, 161 nt, Ruegeria sp.
  source 1..161: mol_type = other RNA; note = Related to GG703517.1
ctctttacgcgttgtgctaagtggcacggtcaggtgtatagccagacccaattttattgatcgcattttggcgcgataagaagaactctctcttatcgagtccgcgttcgcttgttcgataagagagagctcttcttatcgcttctttaaaggtattgagc

SEQ ID NO: 17182 - RNA, 163 nt, Celeribacter baekdonensis
  source 1..163: mol_type = other RNA; note = Related to AMRK01000002.1
ctctttacgcggatgtgcggcaacgcacggtctggtgcacagccggaccctaatttattgatcgcatcttggcgcgataagaacataaagtccttatcgctcttgcaagtattcagaacaataaggactttatgttcttatcgcttcttcaaaggtactgagc

SEQ ID NO: 17183 - RNA, 167 nt, Pseudovibrio sp.
  source 1..167: mol_type = other RNA; note = Related to LMCG01000004.1
atctttacgcggagtgcttgtagagcacggtcgggcttacagctagacccacacttattgacggcatttaagtgcgattggaaggaaaatttcctatcactctcaaagccgtagtttctcgattgacaggaaattttccttccaatcgcccctttgaggtaaagagt

SEQ ID NO: 17184 - RNA, 158 nt, Paenimaribius caenipelagi
  source 1..158: mol_type = other RNA; note = Related to NZ_VFSV01000069.1
acccttacgcggaacgctcttaatgagcgtagtctggtgtacagccggactctaacttattgatttcattttggcgcgataagaccaagaaggtcttatcaaagccgtagtttcgctaagaccttcttggtcttatcgcaccttcaaaggtagggggc

SEQ ID NO: 17185 - RNA, 156 nt, Rhodovulum sulfidophilum
  source 1..156: mol_type = other RNA; note = Related to JAKCFH010000010.1
acccttacgcggaacgctctactgagcgtagtctggtgtacagccggactctaacttattgttaccatttgggcacgataagaccaagaaggtcttatcaaagccgtagtttcgataagaccttcttggtcttatcgcacctttaaggtaggggcc

SEQ ID NO: 17186 - RNA, 144 nt, Marinobacter sp.
  source 1..144: mol_type = other RNA; note = Related to FONF01000022.1
tcctttacgcgtgctcgtacaagcgagttgtgtctggtggatagccggaccctgaattattggaggcatttaggtgcgctggaggcgctacagtctcctatgcggagcctgtagcgcctccagcgcccctttaaggtaaaggac

SEQ ID NO: 17187 - RNA, 157 nt, Desulfovibrio desulfuricans
  source 1..157: mol_type = other RNA; note = Related to NZ_CP072608.1
ctctttacgcggtaagtcttgtccaacaaggctgagtctgatgtttcgtcagacagaattttattgttagctgttatcggcacttcgggccttcgcattatctcccgaagcctccgataatgcgaaggcccgaagtgcctctctctaggtaaagaga

SEQ ID NO: 17188 - RNA, 155 nt, unidentified
  source 1..155: mol_type = other RNA; note = Related to JAFXQN010000116.1; note = Alphaproteobacteria bacterium
atctttacgtgctaaggagttatactctaatgtctgatgtttgattggactgctcgtttattgttacattttatcgtccttgggactctgatatttcatctcccttgctgtacgataaaatatcagagtcccaaggactttcaaaggtaaagatg

SEQ ID NO: 17189 - RNA, 151 nt, Rheinheimera sp.
  source 1..151: mol_type = other RNA; note = Related to PBKZ01000009.1
gaagttgtgcttattcaagcgtaacttttgtggttggtgtatagccaacccgaatagatcgtgatgtatccatgtggtactaaacagaatctccatctgctctagagcagattgaccttctgtttagtacccagaagatcagataatctcc

SEQ ID NO: 17190 - RNA, 176 nt, Photobacterium phosphoreum
  source 1..176: mol_type = other RNA; note = Related to LZFG01000013.1
agcccttagtgaggtttgttttctataaaatgaacctttgtggttggtgtatagccaacccgtagagattgctcgatatttgttgatactaaacagagacgagctgctcatccttcgcagaacgtctctgtttagtatcacagaagtttcgcaagctcactcctgagtaagggctt

SEQ ID NO: 17191 - RNA, 179 nt, Vibrio crassostreae
  source 1..179: mol_type = other RNA; note = Related to SMCU01000001.1
agcccttagtttggttgctttcgagtagcctatggttggtgtatagccgacctgacgacattgatcgtgattgtgttgcactaaacagaaacacgatccgttcgtacctcactgagcgtgtttctgtttagtgcaagccgtttcacttgctgcgcaagttcacgcctttgtaagggctt

SEQ ID NO: 17192 - RNA, 175 nt, Photobacterium carnosum
  source 1..175: mol_type = other RNA; note = Related to NZ_WMDI01000001.1
acccttagttctggttgcttttaagtaatcaatggttggtgtatagccgacctgacgacattgattgtaattgtgttgcactaaacataattacgatccgtgagtgcctcactgagcgtaattatgtttagtgcagacgttcacttgctacgcagtttacgtctttgtaagggtt

SEQ ID NO: 17193 - RNA, 178 nt, Vibrio mimicus
  source 1..178: mol_type = other RNA; note = Related to NZ_ADAF01000002.1
agcccttagcgtggttactttcgggtagccaacggttggtgtatagccgacctgacgaaattgatcgtgattgtgttgcactaaacagaatcacgatccgttcgtacctcactgagcgtgattctgtttagtgcaagccgtttcgcttgctgcgcaacctcacgccttgtaagggctt

SEQ ID NO: 17194 - RNA, 179 nt, Vibrio harveyi
  source 1..179: mol_type = other RNA; note = Related to NZ_JPTQ01000476.1
agcccttagcgtggctactttcgagtagcctatggttggtgtatagccgacctgacgaaattgatcgtgactgtattgcactaaacagattcacgatccgttcgtacctcacggagcgtgattctgtttagtgcaagccgtttcgcttgctgcgcaacctcacgccttagtaagggctt

SEQ ID NO: 17195 - RNA, 180 nt, Vibrio vulnificus
  source 1..180: mol_type = other RNA; note = Related to NZ_CP046834.1
agcccttagttttggttacccttgggtaatctatggtaggtgtatagccaacctgatggaattgatccggattatgttgcactaaacataatcaagatccattcgtacctcatggagcgtgattatgtttagtgcaagccgtttcacttgctacgcaagttcacgccttggtaagggctt

SEQ ID NO: 17196 - RNA, 175 nt, Colwellia psychrerythraea
  source 1..175: mol_type = other RNA; note = Related to JQED01000055.1
tatccttagtttgaagaaagtgcctcggtattttcttttgtggttggtgtatagccgacccgttcgtattgttcggaattgtagtacgtaactacgtaaattccgaaccgctcggaactcgctgagcgtaatttacgtagttacgtacagtcgcaggctcctctagtaaggatat

SEQ ID NO: 17197 - RNA, 160 nt, Pantoea sp.
  source 1..160: mol_type = other RNA; note = Related to NZ_VWXD01000007.1
tacccttagtttggaagtgcttaggcatttcttgtggttggtgtatatccgacccgttactattgtttggtttctcgtcgcaagaacgcgaggcgtcacgaggctccactcgcctcgagccacctcgcgatcttgcgcctcgtaacctgtgtaagggcat

SEQ ID NO: 17198 - RNA, 159 nt, Raoultella planticola
  source 1..159: mol_type = other RNA; note = Related to NZ_CABDVS010000002.1
tacccttagtttggaagtgcttaggcatttcttgcggttggtgtatatccgacccgttactattgtttggtttctcgccgcaagaacgcgaggcgtcacgaggctcgctagcctcgtgccacctcgcgagctcgcgtctcgtaacctgtgtaagggcaa

SEQ ID NO: 17199 - RNA, 157 nt, Pantoea agglomerans
  source 1..157: mol_type = other RNA; note = Related to CP077366.1
acccttagtttggaagtgctccggcatttcttgtggttggtgtatatccgacccgttactattgtttggtttctcgtcgcaagaacgcgaggcgtcacgaggacagccgtcctcgtgccacctcgcgatcttgcgcctcgtaacctgtgtaagggct

SEQ ID NO: 17200 - RNA, 159 nt, Pectobacterium parmentieri
  source 1..159: mol_type = other RNA; note = Related to CP026980.1
tacccttagtctgggagtgcttattgcatttcttgcggttggtgcttagccgacccgattatattgtttggtttctcgtcgcaagatcgagccgcggcacgaggacctcatcctcgagccacgtctcgagctcacgcctcgtaacctatgtaagggtaa

SEQ ID NO: 17201 - RNA, 168 nt, Enterobacter sp.
  source 1..168: mol_type = other RNA; note = Related to FVZI01000003.1
gcccttagtttggaaagtgcaaatgcattttcttgcagttggtgtatagccgactcgatattgttgtttggtttctcgccgcacgatcgcgaggcgtcacgaggcgttgcgagccctcacgcctcgtgacgcctcgcgagcccacgtctcgtaaccagtgtaagggta

SEQ ID NO: 17202 - RNA, 146 nt, Enterobacter cloacae
  source 1..146: mol_type = other RNA; note = Related to BPMY01000001.1
tacccttagttagaaagcatgcagcatgctttcttgtggttggtgtatagccgacccggtgtagttgtgtggtttctcaccgcgagatcgagaagtgtctcgccgacacttctcgagcttgcgcttcgtgacctgtgtaagggaat

SEQ ID NO: 17203 - RNA, 160 nt, Yersinia proxima
  source 1..160: mol_type = other RNA; note = Related to NZ_CABHYG010000014.1
tgtccttagttagaaagtgcctatgcattttcttgtggttggtgtatagccgacccggtattgttgtgtggtttctcgccacaagatcgcgaggcgtcacgaggcgccctcgcctcgagccacctcgcgagcctgtgtctcgtaacctgtgtaagggcat

SEQ ID NO: 17204 - RNA, 163 nt, Proteus vulgaris
  source 1..163: mol_type = other RNA; note = Related to NZ_CP054157.1
gcccttagttagaaaatgtgtattttatgcgttttcttgtggttggtgcatagctgacccgatattgttgtgtggtttctcgccacaagatcgcgagtcgtcgcgaggcgatcgcgcctcgctccgcctcgcgagcctgtgtctcgtaacctgtgtaaggggt

SEQ ID NO: 17205 - RNA, 149 nt, Yersinia pekkanenii
  source 1..149: mol_type = other RNA; note = Related to CQAZ01000033.1
ggcccttagttagagagtgcctaatatggttactttcttgtggttggtgtatagccgacccggtattgttgtttggtttctcatcgcaagatcgggccgcgtcggtagacgcttcccgagcctgcgtctcgtgacctatgtaagggtat

SEQ ID NO: 17206 - RNA, 139 nt, Serratia marcescens
  source 1..139: mol_type = other RNA; note = Related to JADUBR010000008.1
tacccttagttagggagtgccttaggcgctttcttggttggtgtatagccgacctggttttattgtttggtatctcgccgcacgatcgtgaggtgtctgcacctcacgagcttgcgtctcgtgacctgtgtaagggtaa

SEQ ID NO: 17207 - RNA, 154 nt, Escherichia coli
  source 1..154: mol_type = other RNA; note = Related to CP057980.1
tgcccttagcaggaaagtacattcaatatgttactttctagtggttggtgtttagccaactcgtatggattgcttggtatctcgacacaagttagccttgtgtcatttatagacaccaggctaacttgtgtctcgggaactcttgtatgggcat

SEQ ID NO: 17208 - RNA, 137 nt, Geomesophilobacter sediminis
  source 1..137: mol_type = other RNA; note = Related to NZ_JAEMHM010000012.1
acccctagttgaaaggagcacaactcctttctgtggttggtgtatagccgacccgtatatattgttggatactctatgcacatgttcgctgaaggtcctttcatcaaacatgtgcttcgcaactccgagtaggggaa

SEQ ID NO: 17209 - RNA, 116 nt, unidentified
  source 1..116: mol_type = other RNA; note = Related to QHPH01000062.1; note = Verrucomicrobia bacterium
cgtcctagtttgtgagggctataccacctctgtgtggctggtgcatagccggcccgtttagattgtacggtattttcgccctccgtttcacggagggctcgctctaagtaggacaa

SEQ ID NO: 17210 - RNA, 165 nt, Donghicola eburneus
  source 1..165: mol_type = other RNA; note = Related to NZ_FOXY01000012.1
cactcttagctgggtgtttttacgaaaatgctctacgccgggtgattagccaggctgtactagattgaacgacattgggcgccgactttgattggttttgtcggccccggtcttcgcctcggcgccgacaaaaccaatcaaagtcggacgcttaagtaagagaac

SEQ ID NO: 17211 - RNA, 166 nt, Pseudorhodobacter aquimaris
  source 1..166: mol_type = other RNA; note = Related to NZ_LGHS01000039.1
tactcttagctgggtgttttagccgaaaacgctctatgccgggtgatttgccaggctgtatttgattgaacgactttgggcgccgacttcgaatggttttgtcggccccggtcttcgcctcggcgccgacaaaaccattcgaagtcggacgcttaagtaagagaat

SEQ ID NO: 17212 - RNA, 165 nt, Oceanibaculum indicum
  source 1..165: mol_type = other RNA; note = Related to NZ_RBIG01000007.1
tactcttagctgggtgtttttgccgaaacactctatgccgggcgatttgccaggctgaatttgattgaacgacattgggcgccgacttcgaataactttgtcggccccggtctacgcctcggcgccgacaaagttattcgaagtcggacgctcaagtaagagaac

SEQ ID NO: 17213 - RNA, 162 nt, Pseudosulfitobacter pseudonitzschiae
  source 1..162: mol_type = other RNA; note = Related to CP069017.1
ttctcttagctgggtgttttctgaacgctctacgccgggtgattcgccaggctgatttcaattgaacgatatcgggcgccgacttcgaaatgtttgtcgtcaccggtcgttcctcctcggagccgacaaacatttcgaagtcggacgcttaagtaagagatt

SEQ ID NO: 17214 - RNA, 164 nt, Ensifer sp.
  source 1..164: mol_type = other RNA; note = Related to NZ_MBST01000045.1
cactcttagctgagtgtggttgcgagacactctatgccgggcgattggccaggctgtactcgattgaacgattttgggcgccgacttcgaatcattttgtcggccccggtcgttgcctcggagccgacaaaatgattcgaagtcggacgcttaagtaagagaat

SEQ ID NO: 17215 - RNA, 158 nt, Brevundimonas sp.
  source 1..158: mol_type = other RNA; note = Related to RHWX01000009.1
atcccttcgctttaagggtgtcactctacgccgggtgtaaaccaggctgtattcgattgcgtgacatgggcaacgacaacgggcttccgtgtcgcccccggtcaagcggactcggcgccgacacggaagcccgttgtcgtcgctcaaagtaagaggtt

SEQ ID NO: 17216 - RNA, 175 nt, unidentified
  source 1..175: mol_type = other RNA; note = Related to JADCLP010000001.1; note = Erythrobacteraceae bacterium E2-1 Yellow Sea
gcctcttagctgggtgaagtccaacttcgggccaaactctatgccgggcgtttagccaggctgaattaaattgcgcgacaatgggcgccgatttcggaatccgaattcgaccccgggctatgtcgcctcggcgccgaattcggattccgaaatcggtcgctctaagtaaggggaa

SEQ ID NO: 17217 - RNA, 174 nt, Sphingopyxis sp.
  source 1..174: mol_type = other RNA; note = Related to NZ_CP033204.1
gcctcttagctgggtgaagcctaatagaaggccaactctacgccgggtgtttagccaggctgaattaaattgcgcgacaatgggcgccgatttcggaatccgaagtcgaccccgggctcagtcgcctcggcgccgacttcggattccgaaatcggcgcgctcaagtaaggggtt

SEQ ID NO: 17218 - RNA, 156 nt, unidentified
  source 1..156: mol_type = other RNA; note = Related to VBWB01000009.1; note = Rhodospirillaceae bacterium
tccctttggttatcgggggacgctctatgccgggcgtaagccaggctgaaattgattgcgcgagattcggcgccgacttcgggactccgggccggtgccggcctccgtctcggcaccggcccggagtcccgaagtcggccgcttaatgtaagaggt

SEQ ID NO: 17219 - RNA, 167 nt, Blastochloris tepida
  source 1..167: mol_type = other RNA; note = Related to NZ_AP018907.1
gcctcttagctgggtgcgagccctttggggcaacactctatgccgggtgtaaaccaggctgaatcagattgagtgagtttgggcgccgacttcgggtcccggagcggcgccggctcacactcggcgccgctccgggacccgaagtcggccgctttgagtaagaggca

SEQ ID NO: 17220 - RNA, 159 nt, Azospirillum sp.
  source 1..159: mol_type = other RNA; note = Related to NZ_BACU01000350.1
ctcccttagtgtaaaagggggcctcactctatgccgggtgtaaaccaggctgaatgtaattgcgaagattgggcgccgacttcggaatccgcggtcggcaccggctttcgctcggcgccgaccgcggattccgaagtcggccgcttagggtaagaggac

SEQ ID NO: 17221 - RNA, 163 nt, Oceaniglobus trochenteri
  source 1..163: mol_type = other RNA; note = Related to NZ_JACNMM010000013.1
ctctcttagctgggttctagcaagcgagaactctacgccgggtgtttagccaggctgaattgaattggacgctttcgggcgccggcttcggccttcgaagtcgagcccggctgcgctcggtctcgacttcgaaggccgaagccggccgcttaagtaagggaat

SEQ ID NO: 17222 - RNA, 163 nt, Cereibacter sphaeroides
  source 1..163: mol_type = other RNA; note = Related to NZ_CP033435.1
ctctcttagctgggttctgacaagcgagaactctacgccgggtgattagccaggctgaactgaattgtacgcttttgggcgccgacttcagccttcgaagtcgagcccggcttcgctcggtctcgacttcgaaggccgaagccggacgcttaagtaagaggta

SEQ ID NO: 17223 - RNA, 161 nt, Pannonibacter phragmitetus
  source 1..161: mol_type = other RNA; note = Related to NZ_LGSQ01000001.1
cctcttagttgggttctgttaagcgagaactctatgccgggtgtatagccaggctgaactgaattggacgcttttgggcgccgacttcggccttcggagtcgagcccggctgcactcggcctcgcctccgaaggccgaagtcggtcgcttaagtaagaggt

SEQ ID NO: 17224 - RNA, 168 nt, Pararhizobium antarcticum
  source 1..168: mol_type = other RNA; note = Related to NZ_LSRP01000113.1
gcctcttagttgggtgtgtgtagctacaactcactctatgccgggtgtttagccaggctgaattttattgtgcgacattgggcgccggcttcgggaatccgaggcggcaccggcatgcgctcggcaccacctcggattcccgaagccggccgcttaaagtaaggggtc

SEQ ID NO: 17225 - RNA, 168 nt, Rhizobium sp.
  source 1..168: mol_type = other RNA; note = Related to FMVA01000017.1
gcctcttagttgggtgtgtgtagctacagctcactctatgccgggtgtttagccaggctgaatcttattgtgcgacattgggcgccggcttcgggaatccgaggcggcaccggcatgcgctcggcaccacctcggattcccgaagccggccgcttaaagtaaggggtc

SEQ ID NO: 17226 - RNA, 168 nt, Rhizobium wuzhouense
  source 1..168: mol_type = other RNA; note = Related to NZ_QJRY01000001.1
gcctcttagttgggtgtgtgtagctacagctcactctatgccgggtgtttagccaggctgaatcttattgtgcgacattgggcgccggcttcgggaatccgagtcggcaccggcatgcgctcggcaccacctcggattcccgaagccggccgcttaaagtaaggggtt

SEQ ID NO: 17227 - RNA, 178 nt, unidentified
  source 1..178: mol_type = other RNA; note = Related to JAIUNO010000183.1; note = Proteobacteria bacterium
gcctcttagctgggtggaacacctttagccaaaggtggcactctacgccgggtgaaagctaggctgtaagcgattgcgcgagtttgggcgccgacttcgaaacccggagccggcaccggccgcgtgcgtctcggcgccgtctccgggttccgaagtcgggcgctctaagtaagagggc

SEQ ID NO: 17228 - RNA, 182 nt, Thalassospira sp.
  source 1..182: mol_type = other RNA; note = Related to NZME01000040.1
aactcttagtgagggttggtgccttgtctgggcgctcaactcaatgccgggtgcatagccaggcttattctattgcgcgacatggtggcgccggatttagctaatcctgagccattgggtccgcaagtgcttcctcaatggctcaggattagctaaatccggccgcttctaggtaagagttc

SEQ ID NO: 17229 - RNA, 142 nt, Rubrivivax sp.
  source 1..142: mol_type = other RNA; note = Related to JAEUOZ010000023.1
gccacttagctgaaccgttgtcgggttctgtgccgggtgtacagccaggccgattggcattgaacgacatcgtcgcggcaaatccctcggggttcgcctaacggcgaaccccgagggatttgcctcgtccaagtaggtggct

SEQ ID NO: 17230 - RNA, 141 nt, Limnohabitans sp.
  source 1..141: mol_type = other RNA; note = Related to NESB01000001.1
gtcacttagctgaaccgcagtcgaggttctgtgccgggcgtacagccaggccgatggcattgaccgacatcgtcaggcgaatccctcggggttcgcctagcgtcgaaccccgagggattcgcctcgtccaagtaggtggca

SEQ ID NO: 17231 - RNA, 153 nt, Pseudoxanthomonas daejeonensis
  source 1..153: mol_type = other RNA; note = Related to NZ_CP093331.1
gctatctagctggactcaacctgttccatgttgggttccgtgccgggtgtacagccaggccgatcagtttgaacgtcatcgttgcggcgaatccctttgggcttcgcctacggcaaaccccaaagggattcgccgctatcagggtagatagct

SEQ ID NO: 17232 - RNA, 145 nt, unidentified
  source 1..145: mol_type = other RNA; note = Related to JAFLDZ010000021.1; note = Xanthomonadales bacterium
gccacttagctgaaccgttgtcgcggttctgtgccgggcgtacagccaggccgattggtattgatcgacatcgtcgcggcgaatccctctggggtttgcctagcggcaaaccccagagggattcgcctcgatccagtaggtggca

SEQ ID NO: 17233 - RNA, 143 nt, unidentified
  source 1..143: mol_type = other RNA; note = Related to JAFECW010000526.1; note = Proteobacteria bacterium
gccatctagctgaaccaggaaaggttctgtgccgggtgtacagccaggccgaatggtattgaacgactttgtcgtggcgaagccctcacggcttttcctaacgtcaaagccgagagggcttcgccccgatcaagtaggtggcc

SEQ ID NO: 17234 - RNA, 144 nt, unidentified
  source 1..144: mol_type = other RNA; note = Related to DNQH01000067.1; note = Candidatus Andersenbacteria bacterium
gtcagcctagctgaaccgctgtcgaggttctgtgccgggtgtatagccaggccgttttgcattgatcgacatcgtcgttacgaatccctcggggttcgcctaacgtcgaaccccgagggattcgtctcgtccaagtaggtgaca

SEQ ID NO: 17235 - RNA, 162 nt, Pseudoxanthomonas spadix
  source 1..162: mol_type = other RNA; note = Related to QFOJ01000011.1
gccacttagctgggccctactcagagcataagcttcgataagggttctgtgccgggcgtatagccaggccgattgaattgaacgacatcgtcgcggcgaattcctctggaatccgcctagcgtcgaattccagaggaattcgcctcgtctcagtaggtggca

SEQ ID NO: 17236 - RNA, 176 nt, unidentified
  source 1..176: mol_type = other RNA; note = Related to JACPTK010000096.1; note = Betaproteobacteria bacterium
gcctcttagctgagcatctgtagaaggacgaagaataagcagttgctcttggccgggtgtatagccaggccgaactgaattgcgttagattctctggcgatttagcagaaaaagcggaatcgcctgagggcgattcagctttttctgctaaatcgccacgcctcaagtaagagggc

SEQ ID NO: 17237 - RNA, 162 nt, unidentified
  source 1..162: mol_type = other RNA; note = Related to CP053449.1; note = Proteobacteria bacterium
atcctttagttgagtttgtaaaaattaaatactgactctgttgccgggtgtatagctaggccgttctggattgagtggcatgttccgacaattaaagtgtcgcgtcatgcctctgcgagacatgccacgacactttaattgtcgtatcttaggtaagggatt

SEQ ID NO: 17238 - RNA, 163 nt, unidentified
  source 1..163: mol_type = other RNA; note = Related to JACQAP010000013.1; note = Betaproteobacteria bacterium
gtctcttagttgggcttgttcggtttttaattcgaataatgctcttggcccggtgtaccgccaggccgaattatattgcgcgagactctttgggcaggtttcccagcccgagagctcctcgctctcgggctgggaaacctgcccacgctctgagtaagagaca

SEQ ID NO: 17239 - RNA, 163 nt, unidentified
  source 1..163: mol_type = other RNA; note = Related to SCTX01000106.1; note = Betaproteobacteria bacterium
gtctcttagttgggcttgttcggttttctgttcgaatgacgctcttggcccggtgtacagccaggccgaattatattgcgcgagactctttgggctggtttcccatcccgagagctcctcgctctcgggctgggaaaccagcccacgctcttagtaagagaca

SEQ ID NO: 17240 - RNA, 161 nt, unidentified
  source 1..161: mol_type = other RNA; note = Related to JAIQGJ010000086.1; note = Acidobacteriia bacterium
gcgtcttagctgggtttttcgtgaaatctgcgacagaacctaacgccgggtgttcagccaggctgatttgcattgaacgggattctttgggcggcgaggcaaatccgtcctggagtcccaggacggatttgcctctccgcccaacgcttgagtaagacgca

SEQ ID NO: 17241 - RNA, 169 nt, Arcobacter sp.
  source 1..169: mol_type = other RNA; note = Related to DQSS01000385.1
tttcctagtttggcttaaaaatatttattaataattaagcttgtgccaggtgtatagccttggtcggattaaattgttacacattgcttgcgaagttctaattttagctctttgcaacatgcgttacaaagagctaaaattagaacttcgcatcttaaaagtaggagcc

SEQ ID NO: 17242 - RNA, 164 nt, Sulfurovum sp.
  source 1..164: mol_type = other RNA; note = Related to JAIZOJ010000089.1
cttcctagtttggcttaaaaatatttttttattaagcttgtgccaggtgtatagccttggtcgaattaaattgtacacattgcttgcgaagttctaattttagctctttgcaacatgcgttacaaatatctaaaatcagatcttcgcatcttaaaagtaggagc

SEQ ID NO: 17243 - RNA, 156 nt, Aliarcobacter cryaerophilus
  source 1..156: mol_type = other RNA; note = Related to CP021072.1
actttttagctggcttaaatctaattttgattaaagcttgtgcctgatgattaatcaggtcgaattatattgatggtattggctgcagaaatttaaataaattctcagctccatccgaatcagagaatttatttaaatttctgcatcttaaaagta

SEQ ID NO: 17244 - RNA, 151 nt, unidentified
  source 1..151: mol_type = other RNA; note = Related to CP053451.1; note = Proteobacteria bacterium
gtctcttagctgggcatttcgtttggtacatcaaatgctctatgccgggtgtttagccaggctgaattgtattgattgacattcttgggcgggaattgatttcccgctgctcgcgggaagtcaattcccgccccgcttcgtgtaagagaca

SEQ ID NO: 17245 - RNA, 158 nt, Chromobacterium violaceum
  source 1..158: mol_type = other RNA; note = Related to JAFBBB010000001.1
gcttcttagctgagttcctagctttaaagcaattctggaactctatgccgggtgtatagccaggctggtaaaaattgatatacattgcgggcgattttaagcataaatcgcctagcggcgatttatgcttaaaatcgccagcacttgtgtaagaagct

SEQ ID NO: 17246 - RNA, 164 nt, unidentified
  source 1..164: mol_type = other RNA; note = Related to JACRMO010000001.1; note = Gammaproteobacteria bacterium
gcctcttagcttggtatttgctcaaagggaaaagtgagcagatgcttaatgccgggtgtaaagccaggctgaattgcattgattggtattctacggcgggttttcacccgcctcatcgtaccgctgagtcgggtgaaaacccgccgcgctctgagtaagaggct

SEQ ID NO: 17247 - RNA, 146 nt, unidentified
  source 1..146: mol_type = other RNA; note = Related to JAFGUG010000057.1; note = Thiotrichales bacterium
agctcttagtctttgagcaataaatttatattgctatgtcaggcgaatcgctagacatttatcgttaattccatctgggccgacttcaaattgaagttccgctccgcaaaacttcaatttgaagtcgtgcattattgtaagagcta

SEQ ID NO: 17248 - RNA, 174 nt, unidentified
  source 1..174: mol_type = other RNA; note = Related to WGNH01000025.1; note = Alphaproteobacteria bacterium
ttctcttagcgatatgcgtggtcttacctcgcattgccgggcgatgcgccaggtatctttgattgtgtgcactgcagcgccgatttctcgcaaaatcgtcgtctttggtcgctccacaatcgctcctcaaagacgccaatttcgcaagaaatcggccgctctaagtaagagaca

SEQ ID NO: 17249 - RNA, 174 nt, Duganella sp.
  source 1..174: mol_type = other RNA; note = Related to FNEQ01000013.1
tcaattacgcgttttgatggtcaaattcacttggtcattaatgtcgggcgtttcgccagactgatgagattgttagcactgacagcgcagaaagccgcacgcagcccggactgcaacctctcggttttgccgtgccgcgtacgtcttcctgcgctgtgttcaatggtagttgag

SEQ ID NO: 17250 - RNA, 176 nt, Massilia guangdongensis
  source 1..176: mol_type = other RNA; note = Related to NZ_WWCJ01000015.1
tcaattacgcgtttgatgatcgctaatattgcttgatcattaatgtcgggcgtttcgccagactgtcttgattgtttgcactggcagcgcagaaagccgcgcccggcccggactgcgggctggcgcccttgccgtcccgtgcacgtcttcctgcgctgttttcaatggtagttgag

SEQ ID NO: 17251 - RNA, 157 nt, Janthinobacterium sp.
  source 1..157: mol_type = other RNA; note = Related to JABXFH010000020.1
tcaattacgcgttttgatggtcatttttcttggtcattaatgtcgggcgtttcgccagactgattagattgttagcattgacagcgcagaaagccgcacgcggcacggcgcgccgtaccgcgcacgcctttctgcgctgtgtttaatggtagttgag

SEQ ID NO: 17252 - RNA, 180 nt, Cupriavidus basilensis
  source 1..180: mol_type = other RNA; note = Related to AHJE01000051.1
tcaattacgcgttttggtggtcattgactaaccttcgatgatcattaatgtcgggcgtttcgccagactgttcgaattggcggcatttacagcgcagagaggcccacgcggcccggctgcgtacacttgtacttgccgcgccgcgcgggcctctctgcgccgtactccaaggtagttgag

SEQ ID NO: 17253 - RNA, 177 nt, Undibacterium flavidum
  source 1..177: mol_type = other RNA; note = Related to NZ_JACOGA010000020.1
tcaattacgcgtttcgatggtcgtatatatctcttgatcattaatgtcgggcgtttcgccagaccgaatttaattgttagctttaacagcgtagaaacccccgagcgccgtgcccgcgtcgcgagctcctagtcccgtcgcccggtgatttctacgctgttataaatggtagttgag

SEQ ID NO: 17254 - RNA, 160 nt, Herbaspirillum sp.
  source 1..160: mol_type = other RNA; note = Related to JABFMQ010000002.1
tcaattacgcgttttgatgttcaagcatatttctggacattaatgtcgggcggagcgccagactgaatgaattggtaccactgacagcgcagaaagccgcgcccgtcccggctcgccgcgacgaacacgccttcctgcgctgtaatttatggtagttgag

SEQ ID NO: 17255 - RNA, 186 nt, Advenella sp.
  source 1..186: mol_type = other RNA; note = Related to NZ_JABUXU010000010.1
ccaattacgcgtttcgttggctactgacattggtgtctgcaagctgataatgtcgggcgtatcgccagactgaaaaggattggcagcatttttggcgcaaagacggtcgcgcgtcccagctcctccgcatgtctgctcctccgccgggccacgcgaccgtcttcgcgccatatttaggtagttggt

SEQ ID NO: 17256 - RNA, 186 nt, Paralcaligenes sp.
  source 1..186: mol_type = other RNA; note = Related to NZ_CP089848.1
ccaattacgcgtttcgttggctgctgactgaattgtctgtgagctgataatgtcgggcgtatcgccagactgaaaaggattggcagcatttttggcgcaaagacgctcacgcgtcccagctcctccgcatgaatgctcctccgccgggccacgcgaccatcttcgcgccatatttaggtagttggt

SEQ ID NO: 17257 - RNA, 171 nt, Burkholderia stagnalis
  source 1..171: mol_type = other RNA; note = Related to QTOY01000016.1
tcaattacgcgttttgttgatctagcgttgtctggatcaataatgtcgggcgattcgccagactgtcgacgattggggacacttacggcgcagagcggcccgcgcggcccagccggggtgctcccgtccgggccgcgcggaccgctctgcgccaaatcaagggtagttgag

SEQ ID NO: 17258 - RNA, 176 nt, unidentified
  source 1..176: mol_type = other RNA; note = Related to CAKMAA020000066.1; note = Candidatus Nitrotoga sp. HW29
tcagttacgcgtattgtggttattagtttaattaataatccattgtcgggcgaatcgccagacagcaaatgattgtgtgacatcgacggcacgaagaaggccccgcgcccaatcggctccgttgtcactcgcttgggcccgtgaccttcttcgtgcctgtaatttaggtaactgag

SEQ ID NO: 17259 - RNA, 175 nt, Noviherbaspirillum sp.
  source 1..175: mol_type = other RNA; note = Related to NZ_QYUN01000002.1
tcagttacgcgacttgtggttgttggtaaaacgacatgccatcgtcgggcgcatcgccagacggaaaatgattgaacgacattggcggcacgaaaacggccacgcgcccaatctgctcctttgtcgcatcttgggcgcgtgtccattttcgtgcctgtaattcaaggtagctgag

SEQ ID NO: 17260 - RNA, 183 nt, Solimonas sp.
  source 1..183: mol_type = other RNA; note = Related to NZ_CP031704.1
tcagttacgcgtatctgtggttgttagtaatttaacgccattgtcgggcgtatcgccagacagtagttgattgagcgacatcgacggcacgaaggcgcaggcgcgcccaatctgtcccttcgctgtcgctcgtgttgattgggcgcgcctgcgccttcgtgcctgtagttcaaggtagctgag

SEQ ID NO: 17261 - RNA, 176 nt, Methylotenera sp.
  source 1..176: mol_type = other RNA; note = Related to NZ_ARWF01000001.1
tcagttacgcgtattgtggttgttagtaatctaacgttaccattgttgggcgaatcgccagacagtaaatgattgagtgacatcggaggcacgaagaaggccgcgcgcccaaaccgctcctatgtcgctcctttgggcgcgcggccttcttcgtgcctgtaatttaggtagctgag

SEQ ID NO: 17262 - RNA, 168 nt, Acidovorax sp.
  source 1..168: mol_type = other RNA; note = Related to JAGKSE010000017.1
tcagctacgcgtttgtggtgaaggtaactagccatcgtcgggcgatttgccagacggaaatagattgagtgacatcgacggcacgaaaccggccctgcggccactcgcgccaagtctgtcacgagtggccgcaggtccggtttcgtgcctgtaatcagggtatctgag

SEQ ID NO: 17263 - RNA, 149 nt, unidentified
  source 1..149: mol_type = other RNA; note = Related to JAGOGO010000002.1; note = Deltaproteobacteria bacterium
gctctttagaggataagcagtttttaggctttgtccggcgttccgctggacttttacggattgataacacttaccggcatggtggccttcctcggctcaccgtcggtaagccgaggaaggccaccatgcctgcctctaagtaaagagca

SEQ ID NO: 17264 - RNA, 165 nt, unidentified
  source 1..165: mol_type = other RNA; note = Related to JACRDD010000019.1; note = Desulfobacterales bacterium
gctctttagcgaaataaactaagttagattagttttgtctggcgcttcgccggacttgcacctattgatggcatttattggcgcggtaggccgctttggctcaccggcccgttccgcgccgataagccaaagcggcctaccgcgccgcgctctgagtgaagagct

SEQ ID NO: 17265 - RNA, 108 nt, unidentified
  source 1..108: mol_type = other RNA; note = Related to VRUF01000040.1; note = Planctomycetes bacterium
gctctttagcgaagtaagcaagtaagtcgctttgtctggcgttccgtccggacttacacgaattggtaacacttatcggcacgcaggcctccatctaggtaaagagtt

SEQ ID NO: 17266 - RNA, 169 nt, unidentified
  source 1..169: mol_type = other RNA; note = Related to PHBJ01000028.1; note = Deltaproteobacteria bacterium HGW-Deltaproteobacteria-13
gctctttagtgtactaagcattattaattaggctttgtcgggcgcttcgccagactttcacgaattgcttccgtttatcggtatgggatgcccgctgcggctcaccgaatataccgatattcggcaagccgcagcgggcatcccatacctcgctcaaaagtaaagagta

SEQ ID NO: 17267 - RNA, 155 nt, unidentified
  source 1..155: mol_type = other RNA; note = Related to VGGK01000004.1; note = Chlorobi bacterium
gctctttagtgttataagctgttgtatcttttggctttgtccggcgcttcgccagacttttaactattgctagcatttaccggcacgtgagaccgctttggctcaccgctggtaacccaaagcggtctcacgtgccgttttttaagtaaagagca

SEQ ID NO: 17268 - RNA, 178 nt, Pseudodesulfovibrio profundus
  source 1..178: mol_type = other RNA; note = Related to NZ_LT907975.1
gctctttagcggaattgtcggtcaattgccgaaaggtttaagccgtcgtgtcgggcgctccgccagaccaattgttattgtgagcatttagcggcaaataaggacgcgcttttctcctccgtcgctagctcctacgtagaaaagcgcggccttatttgcctcgctcaagtaaagggca

SEQ ID NO: 17269 - RNA, 151 nt, unidentified
  source 1..151: mol_type = other RNA; note = Related to MEKZ01000132.1; note = Acidobacteria bacterium RIFCSPLOWO2_12_FULL_60_22
ctctttacgcggttgagactttcgggtctcagcgtccggcgattcgccggacccagtattgattggtaactcttatcggcacgggtcgagaaaatctcgacaagcgtgtcgagattttctcgacacgtgccttcgctcaaaggtaaagagc

SEQ ID NO: 17270 - RNA, 171 nt, Burkholderia sp.
  source 1..171: mol_type = other RNA; note = Related to FUZY01000002.1
tcaattacgcgcggtagcagattctgtaccttgctatcaattgtcgggcgcttcgccagactgagctgcagtggattcttcaacggcacgaaaacggcctgcgccgaatccgtgtccagtgggtcccgattcggcgcaggccgttttcgtgcctaaattcaggtaattgat

SEQ ID NO: 17271 - RNA, 167 nt, Variovorax sp.
  source 1..167: mol_type = other RNA; note = Related to NZ_LMEK01000025.1
tcaattacgcgtatcggtagcaggagctagctatcaatgtcgggcgcttcgccagactgaaatgcagtggactacaacaacggcacgaaatcggcatgcgccgaatccgtgtccggtaggtcccgattcggcgcatgccgctttcgtgcctaatttaggtaattgaa

SEQ ID NO: 17272 - RNA, 166 nt, Burkholderia contaminans
  source 1..166: mol_type = other RNA; note = Related to JAIZPW010000002.1
tcaattacgcgcggtagcagatatttcgctatcaattgtcgggcgtttcgccagactgagctgcagtggactatattaacggcacgaaaccggcatgcgccgaatccgtgtccagtaggtcccgattcggcgcatgccggtttcgtgcctaatttaggtaattgac

SEQ ID NO: 17273 - RNA, 169 nt, Burkholderia gladioli
  source 1..169: mol_type = other RNA; note = Related to NZ_CADFAD010000001.1
tcaattacgcgcggtagcagacattttttgctatcaattgtcgggcgtttcgccagactgagctgtagtggacttcaataacggcacgaaagcggcatgcgccgaatccgtgtccggtgggtcccgattcggcgcatgccgctttcgtgcctatcttcaggtaattgac

SEQ ID NO: 17274 - RNA, 136 nt, Alcaligenes faecalis
  source 1..136: mol_type = other RNA; note = Related to DOIE01000002.1
acaattacgcgcggtaacaagttgctttgttatcaattgtcgggcgtttcgccagactgagctgtagtggattacatcttcggcacgaaaaaggcataggcctatgcctttttcgtgcctaatttaggtaattgac

SEQ ID NO: 17275 - RNA, 169 nt, Massilia sp.
  source 1..169: mol_type = other RNA; note = Related to CP063848.1
tcaattacgcgaacggtagcaggtaataatagctatcaatgtcgggcgtttcgccagactgagaacaggtgggataccaaccacgacacgaaagcggcccgcgccaaatccgtgtccggtaggtcccgattcggcgcgagccgctttcgtgtctatttaggtaattgag

SEQ ID NO: 17276 - RNA, 170 nt, Duganella margarita
  source 1..170: mol_type = other RNA; note = Related to NZ_WWCS01000001.1
tcaattacgcgaacggtagcagttggttatagctatcaatgtcgggcgcttcgccagactgagaacaggtgggaaaccaatcacgacacgaaagcggctcgcgccaaatccgtgtccggtaggtcccgattcggcgcgagccgctttcgtgtctattttaggtaattgag

SEQ ID NO: 17277 - RNA, 170 nt, Duganella radicis
  source 1..170: mol_type = other RNA; note = Related to WNKY01000030.1
tcaattacgcgaacggtagcttagatgtagggctatcaatgtcgggcgtttcgccagactgagtacaggtgggatatcaatcacgacacgaaagcggcttgcgccaaatccgtgtccggtaggtcccgattcggcgcaagccgctttcgtgtctatattaggtaattgag

SEQ ID NO: 17278 - RNA, 166 nt, Janthinobacterium sp.
  source 1..166: mol_type = other RNA; note = Related to PEFN01000001.1
tcaattacgtgagcggtagcaaaaaaggctatcaatgtcgggcgcatcgccagactgagtacaggtgggacatcaatcacgacacgaagacggcttacgccaaatccgtgtccggtgggtcccgattcggcgtaagccgtcttcgtgtctattcaaggtaattgat

SEQ ID NO: 17279 - RNA, 167 nt, unidentified
  source 1..167: mol_type = other RNA; note = Related to JACPYR010000019.1; note = Nitrosomonadales bacterium
tcaattacgtgtagacggtagcttattcttgttggctatcaattgtcgggcgcttcgccagactgggttgcagtggattcatctacagcacgaaatcgaaaattttcgtttcgtgctatgcccgaatcgaaaattttcgatttcgtgcttaattcaaggtaattgat

SEQ ID NO: 17280 - RNA, 167 nt, unidentified
  source 1..167: mol_type = other RNA; note = Related to MGWP01000046.1; note = Gallionellales bacterium GWA2_55_18
tcaattacgtgtagacggtagctcatttcgttggctatcaattgtcgggcgtttcgccagactgggttgcagtgtagtgtatcaacggcacgaaatcgcaatttttagtttcgtgctgcgcccgaatcgaaaaatttcgatttcgtgcctaattcaaggtaattgat

SEQ ID NO: 17281 - RNA, 175 nt, Ferriphaselus sp.
  source 1..175: mol_type = other RNA; note = Related to NZ_JQKP01000004.1
tcaattacgtgaatggtggcaagttgtttcagctatcaattgtcgggcgtttcgccagactgagttgcagtggagtgcatcaacggcacgaaatcgaaagttttcgattcgggctagatgcagaagcgcccgaatcgaaaactttcgatttcgtgcctaatttaaggtaattgat

SEQ ID NO: 17282 - RNA, 166 nt, Methylotenera sp.
  source 1..166: mol_type = other RNA; note = Related to NZ_ARWC01000001.1
tcaattacgcgaaggtggcttttgtattggctatcaatgtcgggcgtttcgctagactgaattgcagtggattataatttacagcacgaatccaaaatttttgtatcgtgcaaaatgcagcccaatccaaaaattttggattcgtgcttaatttaaggtaattgaa

SEQ ID NO: 17283 - RNA, 167 nt, unidentified
  source 1..167: mol_type = other RNA; note = Related to SSDX01000104.1; note = Rhodocyclaceae bacterium
tcaattacgcgttggatagcttggtttgaggctatcaattgtcgggcgtttcgccagactgagtttgagtggacttcatctacggcacgaaatcggcctggccgaattcgcgccgttggctccgaattcggccaggccgatttcgtgcctagttcaaggtaattgat

SEQ ID NO: 17284 - RNA, 166 nt, Methylomonas paludis
  source 1..166: mol_type = other RNA; note = Related to NZ_CP073754.1
tcaattacgcgttgatagttcttccaaataagactatctgtgtcgggcgattcgccagaccgtacttaagtgggacaccatctacgtcatgaattcggcctcgccgaactcgtgcggtggctcaatttcggcgaggccgaattcatgactatttaaggtaattgat

SEQ ID NO: 17285 - RNA, 138 nt, Macromonas sp.
  source 1..138: mol_type = other RNA; note = Related to NZ_NWMV01000032.1
tcaattacgcgtttggtagcagtcaaagtaaggcgctatctgagtcgggcgattcgctagaccgcaatgaggtgtacgtcatcaacgacacggaaacggccccggggccgtttccgtgtctattcaaaggtaattgac

SEQ ID NO: 17286 - RNA, 170 nt, Collimonas arenae
  source 1..170: mol_type = other RNA; note = Related to NZ_CP009962.1
ctgtctacgcgtgatagcgcacccagctattaatgtcgggcgattcgccagactgtactgtattgagcagatttgacggcacggaattggcccaaaacccactccgcttccgcttcgcttctgctccatgggttttgggccaattccgtgcctaggtcaaggtagatact

SEQ ID NO: 17287 - RNA, 164 nt, Pusillimonas sp.
  source 1..164: mol_type = other RNA; note = Related to NIQA01000002.1
tcaattacgcgtaggtagcctcaactacagggctatcaatgtcgggcgattcgccagactgtattgcagtggatatattttacgaggcaaaaccggcttggccggagagcctcgacactcggctctccggccaagccggttttgcctctatcaaggtaattgaa

SEQ ID NO: 17288 - RNA, 176 nt, Cardiobacterium sp.
  source 1..176: mol_type = other RNA; note = Related to NZ_OU745373.1
ctaattacgcgttatttgatgactttgttttaaataatttagtcatctatgtcgggcgcatcgctagactgaatattaattgtgtcatttgtggcgagtttggaaagaaaattccgagctgtcataaatgacaactcggaattttctttccaaactcgctaattatggtagttagt

SEQ ID NO: 17289 - RNA, 156 nt, Haemophilus influenzae
  source 1..156: mol_type = other RNA; note = Related to CP005967.1
ctaattacgcgttttggtagaaaattctatctattgtcgggcgaatcgccagactgaatattaattgtttccaattgtggcgagataaaggaaaaatttccgcccgcctcgctacacggaaatttttcctttatctcgctcatttaggtagttagt

SEQ ID NO: 17290 - RNA, 172 nt, Neisseria sp.
  source 1..172: mol_type = other RNA; note = Related to LUAO01000054.1
ctaattacgcgtttttggatgattgaatttaaatttagtcgttcatagtcaggcgtttcgctagactgaatattaattgactacatctccgcgagaattcgggctttctcccgccttctcgttagagaagtcgggagaaagcccgaattctcgcttaatttaggtagttagc

SEQ ID NO: 17291 - RNA, 168 nt, Eikenella corrodens
  source 1..168: mol_type = other RNA; note = Related to NZ_LXSJ01000026.1
taatctacgcgaatatgatggtctgtaataagatatgatttttatggttcatcaattgtcaggcgtaatcgctagactgaatctgaattgattccgatctcggcgggaaatatttccattttcctgctgggaaaatggaaatatttcccgctaatttaggtagttagt

SEQ ID NO: 17292 - RNA, 140 nt, Burkholderia ubonensis
  source 1..140: mol_type = other RNA; note = Related to NZ_LPEB01000197.1
tcaattacgcgatcggtagccaacagctatcaatgtccggcgtttcgcaggactgcgcttgggtggacggcgtcaacggcacgaattccgtgtccggcgagccggacacggaattcgtgcctaacttcaaggtaattgag

SEQ ID NO: 17293 - RNA, 140 nt, Burkholderia lata
  source 1..140: mol_type = other RNA; note = Related to CABVPW010000018.1
tcaattacgcgatcggtagcaaacggctatcaatgtccggcgtttcgcaggactgcgcttgggtggacggcgtcaacggcacgaagtacagggccggcgagccgtccctgtacttcgtgcctaaattcaaggtaattgag

SEQ ID NO: 17294 - RNA, 140 nt, Paraburkholderia sp.
  source 1..140: mol_type = other RNA; note = Related to NZ_JAELTS010000025.1
tcaattacgcgatcggtagccaacagctatcaatgtccggcgtttcgcaggactgcgcttgggtggacggcgtcaacggcacgaagtacagggccgtcgagccggccctgtacttcgtgcctaaattcaaggtaattgag

SEQ ID NO: 17295 - RNA, 139 nt, Paraburkholderia dipogonis
  source 1..139: mol_type = other RNA; note = Related to NZ_SNVI01000005.1
tcaattacgcgatgggtagctaagagctatcaatgtccggcgtttcgcaggactgcgtttgggtgggcgacatcaacggcacgaatttcgcgtccggcgagcggccacaaaatccgtgcctaacttcaaggtaattgag

SEQ ID NO: 17296 - RNA, 141 nt, Burkholderia cenocepacia
  source 1..141: mol_type = other RNA; note = Related to CP007783.1
tcaattacgcgatcggtagcagtagctatcaattgtccggcgtttcgcaggactgcgtttgggtggacggcatcaacggcacgaagtacggtgtcggacgagccgacaccgtacttcgtgcctaaattcaaggtaattgag

SEQ ID NO: 17297 - RNA, 139 nt, Nitrosomonas sp.
  source 1..139: mol_type = other RNA; note = Related to QWIC01000028.1
tcaattacgcgattggtagttagcaactatctatgtccggtgtttcgcaggactgcgcttgagtggatggcatcatcggcacaaaatacaaggccgaaaagccgtccttgtattttgtgcctaatttaaggtaattgat

SEQ ID NO: 17298 - RNA, 141 nt, Acidithiobacillus ferrooxidans
  source 1..141: mol_type = other RNA; note = Related to CP001132.1
ctcaattagcgtctgatagattcgtctatcaatgtccggcgtatcgcaggactgagttgagttgcacggcatctacggcacggagacccgtgccggcgagccgtcacgggtctccgtgcctacagtcaaaggtaattgaga

SEQ ID NO: 17299 - RNA, 158 nt, Chromobacterium amazonense
  source 1..158: mol_type = other RNA; note = Related to NZ_MKCR01000001.1
tcaattacgcgtttggtagcttagctgcctcagcagtgtgcaagctatctattgtccggcgtttcgcaggactgagttgtggtggagggcatcaacgacacgaagatcggtgtcggacgagccgacaccgatcttcgtgtctattaaaggtaattgag

SEQ ID NO: 17300 - RNA, 146 nt, Acidithiobacillus thiooxidans
  source 1..146: mol_type = other RNA; note = Related to CP045571.1
tcagctacgcgttttggtagtcaactgtagaactatcaactgtccggcgtttcgcaggactgcggtgtggtggatcgcaattacggctcgaaaagccgcgatggcgagccatcgcaacttttcgagtctagtttaaggtagttgag

SEQ ID NO: 17301 - RNA, 138 nt, Nitrosospira briensis
  source 1..138: mol_type = other RNA; note = Related to NZ_CP012371.1
tcaattacgcgttttgataggtaatctatcaatgtcgggcgtttcgccagactgagctgtagtggagggcatcattggcacaaaatccggcgccggtgcccgtcaccgtatttcgcgcctagcttcaaggtaattgag

SEQ ID NO: 17302 - RNA, 139 nt, Methylotenera sp.
  source 1..139: mol_type = other RNA; note = Related to JABFSF010000055.1
tcaattacgcgtttgatagattatttctatctatgtcgggcgtttcgctagactgagttgtagtggatggcatcattggcacaaaatacagtgctggcgagccatcactgtattttgtgccgatcttaaggtaattgat

SEQ ID NO: 17303 - RNA, 138 nt, unidentified
  source 1..138: mol_type = other RNA; note = Related to JACPOI010000036.1; note = Burkholderiales bacterium
tcaattacgcgttttggtagcttgtctatcaatgtccggcgcttcgcaggactgcgtataggtggagagcttcaacggcacgaaaaagtcgtccgcaagctccctttgtttttcgtgcctacgatcaaggtagttgag

SEQ ID NO: 17304 - RNA, 140 nt, Malikia spinosa
  source 1..140: mol_type = other RNA; note = Related to NZ_PVLR01000019.1
tcaattacgcgaatggtagttttaagactatcaatgtccggcgtttcgcaggactgagctgtagtggatggcatcatcggcacggaatacgtggctggcgagccagccacgtattccgtgcctaattaaaggtaattgaa

SEQ ID NO: 17305 - RNA, 160 nt, Sphingomonas sp.
  source 1..160: mol_type = other RNA; note = Related to NZ_AP022673.1
ccatttacgcgttaagcccctcgttggggtgtctggcgtttcgctggacgtaattcgattgccgagttttatcggtgcgaaagagggtgatgtctcatcgccttcggccgctacgctcgataagacatcaccctctttctcaccttcacaggtaaatggc

SEQ ID NO: 17306 - RNA, 161 nt, Sphingobium sp.
  source 1..161: mol_type = other RNA; note = Related to NZ_CP016456.1
ccatttacgcgtatcgccctttttagggtgtgtctggtgtttcgctggacctaatttgattgccgagttttatcggtgcgaaagagggtgatgtctcatcgcctccggtcgctacgctcgataagacatcaccctctttctcaccttcacaggtaaatggt

SEQ ID NO: 17307 - RNA, 161 nt, unidentified
  source 1..161: mol_type = other RNA; note = Related to JADKHG010000002.1; note = Sphingomonadales bacterium
ccatttacgcgtttagtaccatttggtgctcgtccggcgtttcgctcgacgtcatttgattgtgcagttttatcgttgcgactgagtgcgatgtctcatcgcctcacggacgctacgctcgataagacatcgcactcagtcgcaacttctaggtaaatggc

SEQ ID NO: 17308 - RNA, 170 nt, Caulobacter vibrioides
  source 1..170: mol_type = other RNA; note = Related to APMP01000001.1
ccatttacgcgttctagcgttcctgtcggaacgtgagtctggcgcttcgccggacttaaattgattgtagactcttatcggtgcggaagagggttatgtctcatcgcctcgatgaggccgctacgctcgataagacataaccctcttcctcaccttcacaggtaagtggc

SEQ ID NO: 17309 - RNA, 169 nt, Bradyrhizobium sp.
  source 1..169: mol_type = other RNA; note = Related to JADPJG010000026.1
ccacctacgcgttggtctttcctttccgaagggaagatagtcgggcgtttcgccggacttagtttgattgcgcagtcttatcggtgcggaagagggagatgtctcatcgccttcggacgctacgctcgataagacatctccctcttcctcacctttaagggtaagtggc

SEQ ID NO: 17310 - RNA, 173 nt, Loktanella sp.
  source 1..173: mol_type = other RNA; note = Related to JAFWCE010000141.1
ccacctacgcgaaaaggcgttaaaatgacttttacgcctgtcaggcgtttcgccagacatattttgattgactacatttatcggtgcggaagacggctagaactcatcgtctgttccagaccgctacgctcgataagttctacccgtcttcctcacctgagaaggtaagtggt

SEQ ID NO: 17311 - RNA, 175 nt, Cereibacter azotoformans
  source 1..175: mol_type = other RNA; note = Related to NZ_PHSI01000091.1
ccacatacgcgagtcggcgcatgaaacagagtgattgcgctcgtctggcgtttcgccggacgtaaactgattgttgggatttatcggtgcggaatacgatgaggactcatcgcctctgcgaggccgctacgctcgataagtcctcatcgcattcctcaccttcaaggtaagtggc

SEQ ID NO: 17312 - RNA, 172 nt, Brevundimonas sp.
  source 1..172: mol_type = other RNA; note = Related to NZ_CP039435.1
acacttacgtgattagcactcgttgtgcttggtccagcgctatcgctgagatctaagttgattggcaggttttatgggccacggaagatcgcgccatttccgcgtcattcgtgttctcatgtccgctgcgctcgcggaaatggcgcgatcttccgtgtcctaggtaagtgtt

SEQ ID NO: 17313 - RNA, 160 nt, Sphingomonas sp.
  source 1..160: mol_type = other RNA; note = Related to NZ_JAKRET010000004.1
tcgcttacgcgaacagaccgttttacggttggtccggtgtttcgctggatcgtacattattggtcaaatctgggtgccccagacggacgaagcattcgtccgcctgtgggccactccgttcggtcgaatgcttcgtccgtctggggcttaggtaagcaaa

SEQ ID NO: 17314 - RNA, 160 nt, Novosphingobium sp.
  source 1..160: mol_type = other RNA; note = Related to JALHLF010000113.1
aagcttacgcgaaatggctgtgaaacagctggtctggtgcttcgccggatctcaaatgattggtaacttttaggtgctccgaacgggcgatggtttcgaccgccttacggacgctccgctcggtcgaaaccatcgcccgttcggagcttaggtaagcaat

SEQ ID NO: 17315 - RNA, 161 nt, Sandarakinorhabdus rubra
  source 1..161: mol_type = other RNA; note = Related to NZ_WMHO01000038.1
atgcttacgcgagtaggccattaaattggctggtctggtgtttcgccagatcgaaatcgattggtaagttttatcggccccgaacggacgaagtactcggccgcccaggggccgctccgctcggccgagtacttcgtccgttcggggcttaggtaagcagc

SEQ ID NO: 17316 - RNA, 163 nt, Sphingopyxis panaciterrulae
  source 1..163: mol_type = other RNA; note = Related to NZ_JACIJH010000001.1
gagcttacgcgattaagtgccggagacggtactttgtctggcgcttcgccagatatcacgtaattggtcaattctatgggccccgaacggacgaaggattcgtccgccaaaggccgctccgctcgtacgaatccttcgtccgttcggggcttaggtaagcaac

SEQ ID NO: 17317 - RNA, 189 nt, Erythrobacter sp.
  source 1..189: mol_type = other RNA; note = Related to DPST01000077.1
aagcttacgcgactaggcgttggcaacaacgctgagtctggcggatcgccggacttcatttgattggttggattttggtgcccccgaatgggcgtgatggatcannnnnnnnnnnnnnnnnnnnnnnnnnnnnnnnnnnnnnnnnngggcgatgatccatcacgcccattcggggcttaggtaagtgac

SEQ ID NO: 17318 - RNA, 168 nt, Sphingomonas sp.
  source 1..168: mol_type = other RNA; note = Related to JABFWP010000009.1
aagcttacgcgaatgagcaccgtaactggtgcttggtcgggcgtttcgccagacctcacattattgacctcaattaggggccccgaaagcccgcgatttcccatcgccccttcggggacgctccgctcgaatgggccctcacgctctttcggggcataggtaagcaga

SEQ ID NO: 17319 - RNA, 163 nt, Phenylobacterium sp.
  source 1..163: mol_type = other RNA; note = Related to JADCAE010000108.1
ccacttacgcgttaagcgctctcgggtgcttggtccggcgcttcgccggatctcaatggtctgggaacatttattgccccgaaagagggcggtagatgatcgcctcccggccgctccgctcgatcacccaccgccctctttcgggtctcttgaggtaagtcag

SEQ ID NO: 17320 - RNA, 167 nt, unidentified
  source 1..167: mol_type = other RNA; note = Related to JAGRQC010000004.1; note = Sphingomonadaceae bacterium LXI357
cagcttacgcgacttggtgtcacgtttggatacccgtctggcggttcgccggacgtcacattattgggaatgcttggggctccgaaagagcgcgatggccaatcgccctcagtcgggacgctccgctcgattgcccatcgcgctctttcggagcataggtaagctgt

SEQ ID NO: 17321 - RNA, 168 nt, Agrobacterium vaccinii
  source 1..168: mol_type = other RNA; note = Related to NZ_CP054151.1
tggcttacgtgtattgagtgcattgtctagcacttggtctagcgcttcgctggacctcattatattgcggaattttggtgccctgtaaggtagtgattgaacatcgcccttcgggacgctccgctcgataatcaatccctaccttacagggcttcaagggtaagctat

SEQ ID NO: 17322 - RNA, 168 nt, Rhizobium sp.
  source 1..168: mol_type = other RNA; note = Related to FTMQ01000001.1
cggcttacgtgtattgagtgcgtcgtttagcacttggtctagcgcttcgctggacctcattatattgcggaattttggtgccctgtaaggtagcgattgaacatcgcccttcgggacgctccgctcgatagtcaatccctaccttacagggctttaagggtaagctat

SEQ ID NO: 17323 - RNA, 167 nt, Rhizobium wenxiniae
  source 1..167: mol_type = other RNA; note = Related to NZ_JACHEG010000009.1
aggcttacgtgtcttgagtgcatattagcacttggtctagcgtttcgtctggacctcatcatattgcggaattttggtgccctgtaaggtagcgattgaacatcgcccttcgggacgctccgctcgataatcaatccctaccttacagggctttaagggtaagctat

SEQ ID NO: 17324 - RNA, 164 nt, Rhizobium chutanense
  source 1..164: mol_type = other RNA; note = Related to NZ_NWSV01000001.1
acgcttacgtgcataagcgcttcgtgcgctggtctggcgattcgtccggacctcattatattgtcgagatttggtgccctagaaggtagcgattgccaatcgcccttcgggacgctccgctcgatagccattcactaccttctagggctttaaaggtaagcata

SEQ ID NO: 17325 - RNA, 164 nt, Methylosinus sp.
  source 1..164: mol_type = other RNA; note = Related to NZ_JADNQW010000005.1
atgcttacgcgtaacgtgccgtcaggcacgtggcccggcgcttcgctaggtctaactttattgtcctcacttgcggcctcggaagacggctttgcgccatcgtccgtgggaccgctccgctcgatggcgcaaagccgtcttccgagtccttaaaggtaagcact

SEQ ID NO: 17326 - RNA, 162 nt, Azospirillum sp.
  source 1..162: mol_type = other RNA; note = Related to NZ_JAEPIV010000062.1
atgcttacgcgtaaagtgccgaaaggcacttggccaggcgtttcgcccggtctaattttattgtccccacttgcggcctcggaagatggctttgggccatcgtcgaggaccgctccgctcgatggcccaaagccatcttccgagtccttaaaggtaagcaat

SEQ ID NO: 17327 - RNA, 167 nt, Bradyrhizobium hipponense
  source 1..167: mol_type = other RNA; note = Related to NZ_VSTH01000095.1
acgcttacgcgaatgagcacatgctttcgtgcttggtcgggcgtttcgccagacctcatcttattgtcgagttttgttgccccggaagatagcaactcgctatcgcccttcgggacgctccgctcgatatcaagtcactatcttccgcggcttcaaaggtaagcttt

SEQ ID NO: 17328 - RNA, 168 nt, unidentified
  source 1..168: mol_type = other RNA; note = Related to RXJE01000056.1; note = Bradyrhizobiaceae bacterium
aggcttacgcgtttgagcactactaatgtgcttggtctggtgccttcgctggacctcaacttattgtcgacttttgggcgccccaaacgatagcgccacgctatcgcccaaggggacgctccgctcgatagcatgtcactatcgtttggggcttttagggtaagcagc

SEQ ID NO: 17329 - RNA, 160 nt, Sphingobium sp.
  source 1..160: mol_type = other RNA; note = Related to NC_015976.1
gcgcttacgcggtaagcacttcggtgcttggtctggcgtttcgccagacatcattatattggctagttttttggccccacaagagagcgctgcgcgctcgcccatggggccgctccgctcgaacgcacagcgctctcttgtggggcttggggtaagcatt

SEQ ID NO: 17330 - RNA, 167 nt, Novosphingobium sp.
  source 1..167: mol_type = other RNA; note = Related to NZ_CP039695.1
cagcttacgcgttttgggtgcctaacggcatctagtccgacgtttcgtttggacttcaaattattggtcacacttgtggctccggaagagtccgatacgagatcggctcttgcagagccgctccgctcgatctcgtatcggactcttccggagcataggtaagctat

SEQ ID NO: 17331 - RNA, 156 nt, Sphingopyxis sp.
  source 1..156: mol_type = other RNA; note = Related to JAFVHE010000060.1
cagcttacgcgattagtgcttttgcgctggttcggcgcttcgccgaatctcaatttattgttcccatttggggccctgaaagagagcgatgcaaaatcgccacaggacgctccgctcgattttgcatcgctctcttccagggcctaggtaagctga

SEQ ID NO: 17332 - RNA, 160 nt, Aurantiacibacter atlanticus
  source 1..160: mol_type = other RNA; note = Related to NZ_CP011310.1
ccgcttacgcgttaagcatcctcggatgcttggttcggcgctgcgccgaatctcatatcattggaaccaattggggctccgaaagagagcgatgcgaaatcgccttacggacgttccactcgattccgcatcgctctctttcggagcttaggtaagcaat

SEQ ID NO: 17333 - RNA, 167 nt, Gluconobacter frateurii
  source 1..167: mol_type = other RNA; note = Related to NZ_CP092689.1
gtgcttacgcgtatggtgaaactaccaagcctcaccgtctggcgcttcgccagagttcatatgattgcccagttttcattgccggggagagaacttaggtctcatcgaccacaggctcgctccgctcaatgagacctaagttctctccccggctcaaggtaagcaat

SEQ ID NO: 17334 - RNA, 167 nt, Gluconobacter cerinus
  source 1..167: mol_type = other RNA; note = Related to NZ_JAERLO010000011.1
gtgcttacgcgtatggtgaaaacactaaacttcgccgtccggcgcttcgccggacttcatatgattgttgggttattgttgccgtggagagaacttaggtcttatcgtcctaggggctcgcgctgctcgataagacctaagttctctccccggctcaggtaagcaat

SEQ ID NO: 17335 - RNA, 161 nt, Gluconobacter sphaericus
  source 1..161: mol_type = other RNA; note = Related to NZ_CP068419.1
atgcttacgcgtatggtgaaaaaccaattcgccgtctggcgtttcgccggacttcaaatcattggtaggtttctttgccgaggacgaactgtaggtctcaccgaccttcggtcgctccgctcggtgagacctacagttcgtcctcggcttaggtaagcaat

SEQ ID NO: 17336 - RNA, 169 nt, Altererythrobacter sp.
  source 1..169: mol_type = other RNA; note = Related to JAEULJ010000003.1
gcgcttacgcggttgagcatcttttgctcggtccggcgtttcgtccggacctcatatgattggctggttttatggcaccgaaagacagcgctgcgctgtttgccggtcgcttcgaccggccgctacgctaaacagcgcagcgctgtctttcggtgcttaggtaagctcc

SEQ ID NO: 17337 - RNA, 164 nt, unidentified
  source 1..164: mol_type = other RNA; note = Related to NZ_JAINWL010000001.1; note = Proposed Citromicrobium bathyomarinum
ctgcttacgcgattgagcaatggcctgctcggtctggcgcttcgccggacctcactagattggccggttttatggcaccgaaagacagcagcgcgctgtctcccggcaagccggtcgctccgctagacagcgcgctgctgtctttcggtgcttaggtaagccct

SEQ ID NO: 17338 - RNA, 168 nt, Azospirillum brasilense
  source 1..168: mol_type = other RNA; note = Related to QFOF01000021.1
tcacttacgcgattggcactgtgtgaatgcattagtgctggtctggtgtttcgccggacctcattggattgataggttttacccggcgcggaagggagcggtgtcttaccgcctccggccgctccgctcggtaagacaccgctcccttccgcgcctcaggtaagtgat

SEQ ID NO: 17339 - RNA, 170 nt, Roseomonas deserti
  source 1..170: mol_type = other RNA; note = Related to NZ_MLCO01000142.1
tcacctacgagagtggcactaaactatgaaacttagtgctggtctggcgcttcgccggatctcatttgattggcggcttttcccgggcgcggaaggacgcggtgtcttaccgtcctccggccgctccgctcggtaagacaccgcgtccttccgcgcctttggtaggtgtt

SEQ ID NO: 17340 - RNA, 160 nt, unidentified
  source 1..160: mol_type = other RNA; note = Related to JACKJE010000004.1; note = Methylobacteriaceae bacterium
ccgcttacgcgtatgcgccgaaaggcgcatggcccggtgtttcgctaggtctaagtttattgcggagttctgcggactcggaagatggcgacagcccatcgcccggggacgctccgctcgatggtctgtcgccatcttccgagtctcaaaggtaagcgct

SEQ ID NO: 17341 - RNA, 164 nt, Bradyrhizobium sp.
  source 1..164: mol_type = other RNA; note = Related to NZ_CP088280.1
caacttacgcgataagcaccttgtgtgcttggtccgacgtttcgtcagacctcaattgattgctaggttttatccggtgtggaagaacgcgtggtcttaccgccacaagtggccgctccgctcggtaagaccccaccttcttccacacctccaaaggtaagtga

SEQ ID NO: 17342 - RNA, 165 nt, unidentified
  source 1..165: mol_type = other RNA; note = Related to JAFKKC010000005.1; note = Hyphomicrobiales bacterium
tagcttacgcgagaagcaccttgtgtgcttggtccgacgtttcgtcagacatcagtttattgattggttttatccggtgtggaagaacgtgtggtcttaccgccacaagtggcctctccgctcggtaagaccccacgttcttccacacctccaagggtaagtgat

SEQ ID NO: 17343 - RNA, 165 nt, Rhizobium pisi
  source 1..165: mol_type = other RNA; note = Related to RJJT01000004.1
caccttacgcgagaagcaccttgtgtgcttggtccgacgtttcgtcagacctcaattgattggcaggttttatccggtgcggaagaacgcgtggtcctaccgccacaggtggccgctccgctcggtaaaaccccaccttcttccacacctccaagggtaaggtga

SEQ ID NO: 17344 - RNA, 165 nt, Paracoccus alcaliphilus
  source 1..165: mol_type = other RNA; note = Related to NZ_FODE01000022.1
tagcttacgcgataagcaccttgcgtgcttggtcagacgtttcgtcagacctcaattgattgttaggttttatccggtgtgggtgcacgtgtggtcttaccgccacaagtggcctctccgctcggtaagaccacacgtacacccacaccttcgagggtaagtgat

SEQ ID NO: 17345 - RNA, 165 nt, Mesorhizobium sp.
  source 1..165: mol_type = other RNA; note = Related to SRUN01000004.1
cagcttacgcgaaaggcacctcgtgtgcttggtccgacgtttcgtcagacctcatctgattgtcgggttttatgcggtgtggaataacgcgtggttctaccgccacaagtggccgctccgctcggtaaaaccccaccttatcccacacctccaagggtaagtgat

SEQ ID NO: 17346 - RNA, 164 nt, Rhizobium leguminosarum
  source 1..164: mol_type = other RNA; note = Related to WUFV01000007.1
cagcttacgcgagaagcatctttggtgcttggtccgacgtttcgtcagacatcaattgattgataggttttatccggtgtggaacaacgtggtgtcttaccgccacaagtggccgctccgctcggtaaaacaccacgttattccacacctccaagggtaagtga

SEQ ID NO: 17347 - RNA, 164 nt, Sinorhizobium medicae
  source 1..164: mol_type = other RNA; note = Related to RPJK01000002.1
cagcttacgcgagaagcacctgcggtgcttggtccgacgtttcgtcagacctcaattgattgataggttttatccggtgtggaatatcatggtgtcttaccgccacaagtggccgctccgctcggtaaaaccccacgttattccacacctccaagggtaagtga

SEQ ID NO: 17348 - RNA, 165 nt, Mesorhizobium ciceri
  source 1..165: mol_type = other RNA; note = Related to NZ_KI912610.1
tagcttacgcgaaaagcactttttgtgcttggtccgacgtttcgtcagacctcaattgattgataggttttatccggtgtggaacaacgtggtgtcttaccgccacaagtggccgctccgctcggtaaaactccacgttcttccacacctccaagggtaagtgat

SEQ ID NO: 17349 - RNA, 164 nt, Mesorhizobium sp.
  source 1..164: mol_type = other RNA; note = Related to NZ_WOAC01000018.1
cagcttacgcgagaagcacagttcgtgcttggtccgacgctccgtcagacctcaattgattgctaggttttttccggtgtggaacaacgcggtgtcttaccgccttgataggacgctccgctcggtaaaacccctcgttcttccacacctccaagggtaagtga

SEQ ID NO: 17350 - RNA, 165 nt, Aurantimonas sp.
  source 1..165: mol_type = other RNA; note = Related to JAJAVB010000031.1
tagcttacgtgaaaagcgccttgcgcgcttggtccggcgtttcgtcagacctcagtcgattgttaggttttatccggtgtggaacaacctggggttctaccgccacaagtggccgctccgctcggtagaaccccagcttattccacacctccaagggtaagtgct

SEQ ID NO: 17351 - RNA, 161 nt, Rhizobium taibaishanense
  source 1..161: mol_type = other RNA; note = Related to NZ_MKIN01000018.1
tcacttacgcgaagagcagtttttctgcttggtcgggcgcttcgccggacctcataatattggtaactcttttgttgcgcggaaggtttcgacgtctcgtcgtcttcagaccgcttccgctcgacaagacgtcgaaaccttccacgtcttaggtaagtgct

SEQ ID NO: 17352 - RNA, 164 nt, Neorhizobium sp.
  source 1..164: mol_type = other RNA; note = Related to JALBGV010000046.1
acacttacgcgaagagcagattttctgcttggtcgggcgtttcgccggacctcacatcactggtaactcttttgttgcgtggaaggtttcgacgtcttgtcgtcttcagaccgcttccgctcgacaagacgtcgaaaccttccacgtcttcaaaggtaagtgct

SEQ ID NO: 17353 - RNA, 164 nt, Devosia epidermidihirudinis
  source 1..164: mol_type = other RNA; note = Related to NZ_LANJ01000022.1
attcttacgcgaacagcagatcttctgcttggtcgggcgcttcgccggacctcaactcactgttagctcttttgttgcgcggaaggtttcgacgccttgtcgtcttacgaccgcttccgctcgacaagacgtcgaaaccttccacgtctccagaggtaagtgct

SEQ ID NO: 17354 - RNA, 164 nt, Pannonibacter phragmitetus
  source 1..164: mol_type = other RNA; note = Related to NZ_CP013068.1
acacttacgcgaagagcagaatttctgcttggtcgggcgcttcgccggacctcatatcattggtaactcttttgttgcgcggaaggtttcgacgtcttgtcgtcttcagaccgcatccgctcgacaagacgtcgaaaccttccacgtcttcaaaggtaagtgct

SEQ ID NO: 17355 - RNA, 158 nt, Methylobacterium sp.
  source 1..158: mol_type = other RNA; note = Related to VRUZ01000039.1
gcacttacgcgaaaagcactccggtgcttggtctagcgattcgctggatctaattcgattgagcactctttcccggcgtgaaggctcgttgtgccttgccgccgaaggacgctccgctcgtcaagtcacaacgagccttcacgccttaggtaagtgtt

SEQ ID NO: 17356 - RNA, 165 nt, Parvibaculum sp.
  source 1..165: mol_type = other RNA; note = Related to NZNS01000009.1
atgcttacgcgaatgacaccttgtaatctggtgttagtctggcggttcgccagacatcagttgattgtctactcttattgccgcggaagtccgcggggccccatcgcccttcgggacgctccgctcgataagaccccgcggacttccgcgtcttaggtaagcgac

SEQ ID NO: 17357 - RNA, 159 nt, Rhizobium anhuiense
  source 1..159: mol_type = other RNA; note = Related to NZ_LWMO01000047.1
gcacttacgcgaatggcatgtagcttggtcaggcgcttcgctagacctcactcgattggtttcctttttgcggctcggaaggttccaaagccttcccgcctcgttgaggacgctccgctcggcaagactttgcaaccttccgagcctttggtaagtgat

SEQ ID NO: 17358 - RNA, 160 nt, Rhizobium sp.
  source 1..160: mol_type = other RNA; note = Related to JACHZB010000001.1
gcacttacgcgaatggcattttagcttggtcgggcgtttcgctagacctcactcgattggtttcctttttgcggctcggaaggttccaaagccttaccgcctcaatgaggacgctccgctcggcaagactttgtaaccttccgagcctttggtaagtgat

SEQ ID NO: 17359 - RNA, 162 nt, Agrobacterium salinitolerans
  source 1..162: mol_type = other RNA; note = Related to SGNZ01000005.1
gcacttacgcgaatggcaacatagcttggtcgggcgcttcgctagacctaactcaattggcgtcctttttgcggctcggaaggttctaaagccttaccgcctccgccagaggccgctccgctcggtaagactttagaaccttccgagcctttggtaagtgat

SEQ ID NO: 17360 - RNA, 162 nt, Rhizobium multihospitium
  source 1..162: mol_type = other RNA; note = Related to NZ_FMAG01000002.1
acacttacgcgaatggcaatgtagcttggtcgggcgcttcgctagacctcactcaattggtgtcctttttgcggctcggaaggttccaaagccttaccgcctccgccagaggccgctccgctcggtaagactttggaaccttccgagcctttggtaagtgat

SEQ ID NO: 17361 - RNA, 162 nt, Ensifer sp.
  source 1..162: mol_type = other RNA; note = Related to JACVBP010000001.1
ttacttacgcgatgggcactactgctcggtcgggcgcttcgctagacctcaatcgattgaccgcttttattcggctcggaaggatatgcgatccatccgtccgataaatcggtcgctccgctcggatagctcacatttccttccgagccttaggtaagtgat

SEQ ID NO: 17362 - RNA, 160 nt, Phyllobacterium myrsinacearum
  source 1..160: mol_type = other RNA; note = Related to JACGXN010000001.1
tcacttacgcgaatggcatgaattgcttggtcgggcgcttcgctagacctcatttgattgaccgggattattcggctcagaagggtgtgaatccttttcgccttcttcggtcgctccgctctacaaggcttcacacccttctgagcctttggtaagtgat

SEQ ID NO: 17363 - RNA, 160 nt, Labrys sp.
  source 1..160: mol_type = other RNA; note = Related to NZ_CP043489.1
tcacttacgcgattagctttagagcttggtctggtgtttcgctagacctcaatcgattgggcagttttattgggctcggaaggttcaaaagccttgcagacccaatggggccgctccgctcagcaaggcttttgaaccttccgagccattggtaagtgat

SEQ ID NO: 17364 - RNA, 170 nt, Brevundimonas diminuta
  source 1..170: mol_type = other RNA; note = Related to NZ_CP073063.1
ccacttacgcgtatgggttgaaattctgtttcgactttaagtctggcgcttcgccggacatcagttgattggtcattttttgggtgccgtgcaagagaccgacatcttgtcgcctttggacgctccgctctttcagatgccgttctcttgcacggccttaggtaagtgat

SEQ ID NO: 17365 - RNA, 155 nt, Roseococcus sp.
  source 1..155: mol_type = other RNA; note = Related to JAHCDM010000009.1
ttgattacgtgatggcactgcttgtgctttgtctggcgtttcgccagacatgactggattgtacacttctggccggcgcgggaggccgcggcgactcgccgcgagccgctccgctcggcaagtcgccgcggcctcccgcgcctttggtaattgaa

SEQ ID NO: 17366 - RNA, 152 nt, Ahrensia marina
  source 1..152: mol_type = other RNA; note = Related to NZ_JXMU01000014.1
gtacttacgcgaatggcctctggccttgtctggtgcttcgccagactttctaaaattggacttttcttgggcggctccaaggagcgaaggaacttatccttcacgctccgctgtctaagttccttcgctccttggagccttaggtaagtgca

SEQ ID NO: 17367 - RNA, 162 nt, Variovorax sp.
  source 1..162: mol_type = other RNA; note = Related to FOBJ01000004.1
gttcttacgcgctctacggatgggtcacgtagaaacagtcgggcgattcgccagactttcaatgattgagtgcatttaccgcggtgaaaccggcttcgggatctcctgcgggcactcggagaacccgaagccggtttcaccgcgcaatttaaggtaagagct

SEQ ID NO: 17368 - RNA, 161 nt, unidentified
  source 1..161: mol_type = other RNA; note = Related to JAFKGB010000002.1; note = Burkholderiales bacterium
gttcttacgcgctctacgaatgggttacgtagaatagtcgggcgattcgccagacttttaatgattgagtgcatttaccgcggtgaaaccggcttcgggttttcctgcgagcactcggaaaacccgaagccggtttcaccgcgcaatttaaggtaagaact

SEQ ID NO: 17369 - RNA, 162 nt, Rubrivivax gelatinosus
  source 1..162: mol_type = other RNA; note = Related to NZ_NRRT01000126.1
gttcttacgcgttctacggatgggtcacgtagagacagtcgggcgattcgccagacttgcaatgattgagtgcatttaccgcggtgaaaccggcttcgggttctcctgcgggcactcggagaacccgaagccggtttcaccgcgcaatttaaggtaagaacc

SEQ ID NO: 17370 - RNA, 162 nt, unidentified
  source 1..162: mol_type = other RNA; note = Related to JAFLDL010000016.1; note = Candidatus Accumulibacter sp.
gttcttacgcgttctacggatgggtcacgtagagacagtcgggcgcttcgccagacttgcaatgattgagtgcatttaccgcggtgaaaccggcttcgggttcgcctgcgggcactcggagaacccgaagccggtttcaccgcacaatttaaggtaggaact

SEQ ID NO: 17371 - RNA, 163 nt, Thiomonas arsenitoxydans
  source 1..163: mol_type = other RNA; note = Related to FP475956.1
gtccttacgcgcttctacgtttcgggttacgtagaaaatgtcgggcgtttcgccagactcgtattgattgggtgcatttaccgctgcgaaaccggattcgggttttcctgcgggcactcggaaaacccgaatccggtttcgcagcgcatttctggtaaggact

SEQ ID NO: 17372 - RNA, 161 nt, Pusillimonas sp.
  source 1..161: mol_type = other RNA; note = Related to WWER01000012.1
gttcttacgcgtctctacgtcaagggttacgtggatatgtcgggcgcttcgccagacttgcaatgattgagtgcatttaagctgcgaaagcggctccgcgttttcctgcgggcactcgaaaaacccgaagccgctttcgcagcatcttaaaggtaagaacg

SEQ ID NO: 17373 - RNA, 169 nt, Achromobacter xylosoxidans
  source 1..169: mol_type = other RNA; note = Related to CYTI01000014.1
tgctttacgtgtttctacggttttgggttccgtaggatagtcgggcgcttcgccagacagtcaatgattgaccgggattaccgccgcaaaggccgttcgggttttactgcggtccggtaggtcctcgaaaaacccgaacggcctttgcggcgcactttgggtaaagcaa

SEQ ID NO: 17374 - RNA, 160 nt, Paraburkholderia sp.
  source 1..160: mol_type = other RNA; note = Related to NZ_JAJEJQ010000001.1
gcctttacgcggttctacgacgggctccgtagaatagtcgggcggttcgccagactgacaatgattgatcgagattaccgccgcgaaaccggtttcgggttttcctgcgggcactcggaaaacccgaaaccggtttcgcggcgcactttaggtagggcaa

SEQ ID NO: 17375 - RNA, 160 nt, Burkholderia gladioli
  source 1..160: mol_type = other RNA; note = Related to NZ_UWYX01000002.1
cgctttacgcgattctacgacgggctccgtagaatagtcgggcggttcgccagactgacaatgattgaccgagattaccgccgcgaagccgctttcgggttctcctgcgggcactcggaaaacccgaaagcggcttcgcggcgcactttaggtaaggcaa

SEQ ID NO: 17376 - RNA, 160 nt, Burkholderia cenocepacia
  source 1..160: mol_type = other RNA; note = Related to QTRZ01000002.1
cgctttacgcggttctacgacgggctccgtagaatagtcgggcgaactgccagactgacaatgattgaccgagattaccgccgcgaacccgctttcgggttctcctgcgggccctcggaaaacccgaaagcgggttcgcggcgcactttaggtaaggcaa

SEQ ID NO: 17377 - RNA, 170 nt, Polycyclovorans algicola
  source 1..170: mol_type = other RNA; note = Related to NZ_JOMH01000001.1
ttttctacgcattgggctgggagcgtaggagaattgtcgggcgtttcgccagacttacatcgattgactgggattattgccgcaaactaccgtcgggattccctgcggtctcggtgcctcggtcctcggaaatcccgccggtagtttgcggcacagatcaggtaaagaga

SEQ ID NO: 17378 - RNA, 156 nt, Xanthomonas sp.
  source 1..156: mol_type = other RNA; note = Related to JACVAP010000002.1
gctttttagcggtctgcgtttgccgcgcagatagtctgacgcttcgtcggactgttgaaattgcgtgggattatcgccgtaaagccggtgcccggcttcgctgcgagccctcgcaaagccgggcaccggctttacggcgcatcaaagtaaaaagca

SEQ ID NO: 17379 - RNA, 171 nt, Salinisphaera sp.
  source 1..171: mol_type = other RNA; note = Related to PBYA01000036.1
ctctttacgcgattccatgcgttgggtttgtggaatagtcgggcgattcgccagacagttatttattgaccgggtttatcaccgcgaaaacgcaggcgggtttccctgcgcttccggtaggttctcggaaaacccgcctgcgttttcgcggtgcaatttgaggtaaagggt

SEQ ID NO: 17380 - RNA, 170 nt, Stenotrophomonas maltophilia
  source 1..170: mol_type = other RNA; note = Related to JAIOAJ010000071.1
ctcttcacgcgatgcgacatggagtcgacatggtctggcgttgcgccagacagctagggattgattgggtttatcgccccgcatagccggtacggtctcaccgttccggtccagtgggtcctcgcggtaagcccgtaccggctatacggggcgttttcttggtgaagaga

SEQ ID NO: 17381 - RNA, 170 nt, Stenotrophomonas maltophilia
  source 1..170: mol_type = other RNA; note = Related to JADUKR010000001.1
ctctttacgcgatgtgacaggaagtcgatgtggtctggcgttgcgccagacagcaatgaattgaacgggattatcgccccgcacagccggcacggtctcaccgctccggtccagcgggtcctcgcggtaagcccgtgccggctgtgcggggcgttctcttggtgaagagc

SEQ ID NO: 17382 - RNA, 175 nt, Xanthomonas arboricola
  source 1..175: mol_type = other RNA; note = Related to MIGM01000010.1
ctctttacgcgacgtgacatggaaagttaatggttaagtctggcgttgcgccagactgcaaagaattgattgggtttatcgccccgcatagccggctcggtctcaccgctccggtccagtgggtcctcacggtaagcccaatccggctatgcggggcgttctcttggtgaagagc

SEQ ID NO: 17383 - RNA, 185 nt, Luteibacter sp.
  source 1..185: mol_type = other RNA; note = Related to NZ_JQNL01000001.1
ctctttacgcgaatggcaaggggaaatgccgaagctgttgactgtgtctggcgatgcgccggactgctaaggattgattgggattaccgccccgtgtagccggcttggtctcaccacctccggtccagtgggtcctcaatggtaagcccaagccggctacacggggcgtcttcatggtaaagagt

SEQ ID NO: 17384 - RNA, 180 nt, Lysobacter gummosus
  source 1..180: mol_type = other RNA; note = Related to NZ_CP093547.1
ctctttacgcgacggcaatggaatgccacgaattgtgaaatgtccggcgctgcgccggacggcgagggattgattgggattatcgccccgtataaccggctcgggctcaccgcctccggtccgcgggtcctcggcggtaagcccgatccggttatacggggcggtttcttggtgaagaga

SEQ ID NO: 17385 - RNA, 176 nt, Pseudoxanthomonas sp.
  source 1..176: mol_type = other RNA; note = Related to JACVAK010000003.1
ctcttcacgcgattggcgatggaacgccgctgcgaaaggactgggtccggcgttgcgccggacgggtatggattgttgactcttatcgccccgtacagccggctaggcctcaccgccacctgctcggtggtggtaaggcctagccggctgtacggggcggtttcttggtgaagagt

SEQ ID NO: 17386 - RNA, 184 nt, Pseudoxanthomonas sp.
  source 1..184: mol_type = other RNA; note = Related to JACVAG010000005.1
ctctttacgcgttaggcaagggaactgccagcactatgcgggaatggtccggcgttgcgccggacagcaaagaattgtctgggtttatcgccccgtacagccggattggtctcaccgctccggcccttcgtacctccgcggtaagcccaatccggctgtacggggcgtttttggggtaaagagt

SEQ ID NO: 17387 - RNA, 165 nt, Lysobacter spongiicola
  source 1..165: mol_type = other RNA; note = Related to NZ_FUXP01000009.1
ctctttacgcgtgcgatcagggctgatcgttatgtcgggcgattcgccagactggatgaggattgtcttcacttatcggcggaaaacaccgcggggcctcacctcctccgcgttgctcccccggtaagtccccgcggcgttttccgcctatttagggtaaagagc

SEQ ID NO: 17388 - RNA, 165 nt, Xanthomonas arboricola
  source 1..165: mol_type = other RNA; note = Related to NZ_CP041965.1
ctctttacgcgtgcgatcaaggtagatcgatatgtcgggcgtttcgccagactgtataaggattggtagcacttatcggcggaaagcaccgcggggtctcacctcctccgcttcgctcccccggtaagcccccgcggcgttttccgcctatctagggtaaagagt

SEQ ID NO: 17389 - RNA, 166 nt, Xanthomonas hortorum
  source 1..166: mol_type = other RNA; note = Related to VCME01000014.1
ctctttacgcgtttgatcatggctgatctgcttgtcgggcgtttcgccagactgtataaggattgttgacttttatcggcggaaaacaccgcgaggccttacctcctccgcgtgcgctcccccggtaaggcctcgcggcgttttccgcctttttaaggtaaagaga

SEQ ID NO: 17390 - RNA, 166 nt, Stenotrophomonas maltophilia
  source 1..166: mol_type = other RNA; note = Related to JAAAEX010000007.1
ctctttacgcgcttggtcaaggtagatcgaattgtcgggcgtttcgccagactgtataaggattgtcggtatttatcggcggaaaacaccgcggggcctcacctcccccgcatgcgctcccccggtaagtccccgcggcgttttccgcctatttaaggtaaagagt

SEQ ID NO: 17391 - RNA, 164 nt, unidentified
  source 1..164: mol_type = other RNA; note = Related to NTJG01000001.1; note = Xanthomonadaceae bacterium NML93-0793
ctctttacgcgaatgatcaggattgatcaaattagtcgggcgcttcgccagacagtttaaggattgacggtatttatcggcggaaaacaccgcggggcctcacctccgcagaagctcctccggtaagtccccgcggcattttccgcctttaaaaggtaaagggt

SEQ ID NO: 17392 - RNA, 181 nt, Nitrosomonas sp.
  source 1..181: mol_type = other RNA; note = Related to FODO01000031.1
ctctttacgcgttcggggctttaaaaaaatctcatatggttttatagccttagtccggcgcttcgccagacttttattattggtagtatttgtaggcacaaaatccgtgatcgatcagactgcgcgtaaaacagcttgctgatcgctcccaaattttgtgcctatttttagggtaaagaga

SEQ ID NO: 17393 - RNA, 152 nt, Salinarimonas ramus
  source 1..152: mol_type = other RNA; note = Related to NZ_BMMF01000004.1
ctctttacgcgaacggggggctacccccctgccgggcgtttcgccaggcaatcgaaaattgatcgagtttaacggcgcggacgacgggcttaactgcaccgaagtctcggcgcagttaagcccgtcgtccgcgccttctttaggtaaagagc

SEQ ID NO: 17394 - RNA, 177 nt, Croceicoccus ponticola
  source 1..177: mol_type = other RNA; note = Related to NZ_RXOL01000001.1
ctctttacgcgtaagttggagttccatccccaacttcgtcgggcgcttagccagacgtttatgttattgggagcgtttatcggcaggaaaggcctggagagctcatctcttcggcaagcctcgcccttcgggccgatgacctctccaggcctttcctgccttcctgaggtaaagaga

SEQ ID NO: 17395 - RNA, 193 nt, Microvirga sp.
  source 1..193: mol_type = other RNA; note = Related to NZ_CP069354.1
ctctttacgcgtttcgagtcgatcaaggtttccccttgtgaaactcggtcgggcgcttcgccagacagaccgttattgggtaggtttatcggcatgaaggaggctggagagttcatctctcgtcgcctttagctcctcgcccttcggtacgatgacctctccagcctccttcataccttcaaaggtaaagagt

SEQ ID NO: 17396 - RNA, 188 nt, Undibacter mobilis
  source 1..188: mol_type = other RNA; note = Related to QRGO01000001.1
ctctttacgcgtttcgaatctgtttgggtaaccaagcgggttctcgtcgggcgcttagccagacataacgttattgtggaggtttatcgggatggtgagggtcggagagcttatctctcgtcgctctcgctcctcgcctgcggccgataagctctccgaccctcaccatcccttcaacggtaaagagc

SEQ ID NO: 17397 - RNA, 190 nt, Mesorhizobium sp.
  source 1..190: mol_type = other RNA; note = Related to SALN01000219.1
ctctttacgcgaaaggagtcggtcgcaactgtatcgatcttctcttgtcgggcgcttagccagacatcacgttattgtgggcgtttatcggtatgaacaagcccgaggaggccatctctcgtcgccttcgctcctcgcctgcggccgatgccctcctcgaactagttcatacctctcaaaggtaaagagt

SEQ ID NO: 17398 - RNA, 188 nt, Hoeflea sp.
  source 1..188: mol_type = other RNA; note = Related to NZ_CP011479.1
ctctttacgcgtatgagagtggttcagaaattctgttccttctcttgtcgggcgcttagccagacattctgttattgtgagcgtttatcggcatgagcatggccaagaaggccatctctcgtcgcttcgctcctcgtctacgagcgatgtccttcttggccatgctcatacctttaagggtaaagagc

SEQ ID NO: 17399 - RNA, 186 nt, Mesorhizobium sp.
  source 1..186: mol_type = other RNA; note = Related to JAHBYX010000006.1
ctctttacgcgaatggagtcggtcctcgtttggatcagctcttgtcgggcgtttcgccagacattctgttactgtgggcgtttgtcggtatgaacggggttgagaaggccatctctcgtcgcctatgctcctccccttcgggccgatgcccttctcaaccccgttcataccttctaggtaaagagt

SEQ ID NO: 17400 - RNA, 176 nt, Ancylobacter aquaticus
  source 1..176: mol_type = other RNA; note = Related to RXIO01000070.1
ctttttacgcgctaggggagcgcaagctccccgagtcgggcgattcgccagacaaattaagattgctgaggtttatcggcagggaagtcttcggagaggtcggctctcgtcgccagctcctcgcctcccggccgccgacctctccaaagccttccctaccgtcaaaggtaaagagc

SEQ ID NO: 17401 - RNA, 177 nt, Neorhizobium galegae
  source 1..177: mol_type = other RNA; note = Related to CP090554.1
ctctttacgcgttttgagccatcactttggtgatggttccgtcgggcgctaagccagacggtaatgacattgtgagcgtttatcggcaggaagaagctcgagagtccacctctcggcttacgcctcgttaccaccggtgaactctcgatcttcttcccgccttcagaggtaaagagt

SEQ ID NO: 17402 - RNA, 179 nt, Rhizobium tubonense
  source 1..179: mol_type = other RNA; note = Related to NZ_PCDP01000036.1
ctctttacgcgttttgagtcgtcaactgagttgatcggctacgtcgggcggtaagccagacggaattaaaactgtgagcgtttatcggcaggaagaagaccgagagttcacctctcggcttacgcctcgttccaccggtgaactctcggtcttcttcctaccttccagaggtaaagagt

SEQ ID NO: 17403 - RNA, 169 nt, Sulfitobacter marinus
  source 1..169: mol_type = other RNA; note = Related to NZ_FPAJ01000001.1
ctctttacgcgtttgaacctgcgtggttccgtcgggcgtttagccagacgacatgttattggggggtcttatcggcaggtagatcgtggactagccatctctcggctatcgcctcgcctacggtcgatggctactccacgatctacctgcctctttaagggtaaagaga

SEQ ID NO: 17404 - RNA, 169 nt, Paracoccus luteus
  source 1..169: mol_type = other RNA; note = Related to NZ_SDEA01000022.1
ctctttacgcggatgaaccttcgtggttccgtcgggcgcttagccagacgaattgttattgggtggtcttatcggcaggaagctcgtggagcagccatctctcggcttgcgcctcgcctgacggccgatggctgctccacgagcttcctgcctcctaagggtaaagagc

SEQ ID NO: 17405 - RNA, 177 nt, Devosia sp.
  source 1..177: mol_type = other RNA; note = Related to NZ_LMEM01000009.1
ctctttacgcgttttgaaccaggcgtgcttggttccgtcgggcgcttagccagacgtcccgttattgataggtcttatcggcaggactagacgcgagaactcatctctcggctacgcctcgcaccttcggcaccgatgagtcctcccgtctactcctgcctctctgaggtaaagagc

SEQ ID NO: 17406 - RNA, 171 nt, unidentified
  source 1..171: mol_type = other RNA; note = Related to JAFKLT010000057.1; note = Sphingomonadales bacterium
agcttcacgcgaatgggccttgcgccctgtcgggcggttcgccagacatgcatggattgaacgatattggcggctcggttcggccttgggttcccttggccctacggggcgttctcttcgttcactccaaggaaacccaaggccgaaccgagcctttcaaaggtgaagctt

SEQ ID NO: 17407 - RNA, 149 nt, Hyphomonas sp.
  source 1..149: mol_type = other RNA; note = Related to AWFC01000023.1
gttcttacgcgtaatcaccggtttgtcgggcgtttcgctagactgaaatgtgattggttctatctagggcgcgcttagagtcgcgaattctaagccgacacggtcgccttagaattcgcgactctaagcgtcgctcaaaggtaagaaat

SEQ ID NO: 17408 - RNA, 186 nt, Brevundimonas sp.
  source 1..186: mol_type = other RNA; note = Related to DOSK01000382.1
ctctttacgcgtaggtcgattccccgtgaaccgatctgtgtcgggcgcttcgccagaccatacgttattgtgaggtttaatcggtagggatgggtcccgagggctcatctcttcgtcgcggaaggctcctcggccttcggcccgatgacccctcgcgacccatccctaccttcacaggtaaagaga

SEQ ID NO: 17409 - RNA, 186 nt, Aureimonas phyllosphaerae
  source 1..186: mol_type = other RNA; note = Related to FOOA01000003.1
ctctttacgcgtctaaggtgtcctggaatcaggagccctgtcgggcgatcagccagacagaatggtattgtggaggtttatcggtatgaagaagaccgggagtttatctctcgtcaccttcgttcctcgtcgccttgcgagcgataaactcccggtcttcttcataccttttctgaggtgaagggc

SEQ ID NO: 17410 - RNA, 138 nt, Vibrio anguillarum
  source 1..138: mol_type = other RNA; note = Related to CP023054.1
atctttacgcgttagaagcgttgttgacttcatctggtgtatcactggaatattttgattgtttatattttgaccacggtcacgacaaaaatcgcttcgcgatttgttgtcgcaaccgtgcccatctaggtaaagatt

SEQ ID NO: 17411 - RNA, 137 nt, Photobacterium sp.
  source 1..137: mol_type = other RNA; note = Related to CH724143.1
atctttacgcgttagaagcgttgctgacttcatctggtgtatcactagaatattttattgtttatattttgatcacggtcacgacaaaaatcgcttcgcgatttgttgccgcaaccgtgcccatctaggtaaagatt

SEQ ID NO: 17412 - RNA, 137 nt, Vibrio sp.
  source 1..137: mol_type = other RNA; note = Related to JAKKCQ010000002.1
atctttacgcgtaagaagcgttgacgacttcatctggtgtatcactagaattattgattgtttataatttgaccacggtcacgtcaaaaatcgcttcgcgatttgttgccgcaaccgtgtccatctaggtaaagatt

SEQ ID NO: 17413 - RNA, 137 nt, Proteus mirabilis
  source 1..137: mol_type = other RNA; note = Related to JADRZV010000010.1
atctttacgcgttagaagcgctactgacttcatctggtgtatcactagaatatttgattgtttatattttgaccacggtcacgtcaaaaatcccttcgtgatttgttgccgcaaccgtggccatctaggtaaagatt

SEQ ID NO: 17414 - RNA, 137 nt, Aliivibrio fischeri
  source 1..137: mol_type = other RNA; note = Related to NZ_LTZD01000015.1
atctttacgcgaacgaagcgttgtcgacttcatctggtgtatcactagaatttttgattgtttatattttgaccacggtcacggcaaaaatcgcttcgcgatttattaccgcaaccgtgcccatctaggtaaagatt

SEQ ID NO: 17415 - RNA, 137 nt, Photobacterium kishitanii
  source 1..137: mol_type = other RNA; note = Related to PYNJ01000059.1
atctttacgcgaagaagcgttacagacttcatctggtgtatcaccggaatttaacgattgttatccttttgatcacggtcactccaaaaatcgcttcgcgatttgttgtcgcaaccgtgaccatctaggtaaagata

SEQ ID NO: 17416 - RNA, 134 nt, Shewanella sp.
  source 1..134: mol_type = other RNA; note = Related to CP045427.1
atctttacgcgttagaagtatatcttcatccggcgtatcgccggagcttagtaattgggtaaaattacgagcacgatactcgaaaaatcgctacgcgatttgttctcgcatcgtgcccgatctaggtaaagata

SEQ ID NO: 17417 - RNA, 135 nt, Vibrio alginolyticus
  source 1..135: mol_type = other RNA; note = Related to NZ_CP042449.1
gtctttacgcgttagaagtataatcttcatctggcgtatcgccggagctttgtaattgggtaaaattacgagcacgatactcgaaaaatcgcttcgcgatttgttctcgcatcgtgcccgatctaggtaaagata

SEQ ID NO: 17418 - RNA, 132 nt, Salmonella enterica
  source 1..132: mol_type = other RNA; note = Related to AAIODZ010000022.1
ctctttacgcgatagaggcgtacttgcttcatccggtgtatcactggaatttttcgattgtggtcatttatgccacggccttcccaaaaatcttcgatttttactcaggccgtgcccttctaggtaaagagc

SEQ ID NO: 17419 - RNA, 132 nt, Serratia sp.
  source 1..132: mol_type = other RNA; note = Related to NZ_CP025085.1
ctctttacgcgatagaggcgtatctgcttcatctggtgtatcaccggaacttgttgattgtggtcatttatgccacggccttcccaaaaatcttcgatttttactcaggccgtgcccttctaggtaaagagc

SEQ ID NO: 17420 - RNA, 134 nt, Serratia fonticola
  source 1..134: mol_type = other RNA; note = Related to DAEHES010000012.1
ctctttacgcgtttgaagcgtatacagcttcatccggtgtatcaccggaacttttggattgtggctatttgggccacggtctgagtgaaaatctcacgattttaactcagcccgtgcctttcttggtaaagagc

SEQ ID NO: 17421 - RNA, 133 nt, Pectobacterium brasiliense
  source 1..133: mol_type = other RNA; note = Related to JAFJZU010000009.1
ctctttacgtgtttgaagcgtatacagcttcatctggtgtatcaccagaacttttagattgtggccacttatgacacggtcaccgtaaaaatcgcagatttttacgccgcccgtgcctttcttggtaaagagt

SEQ ID NO: 17422 - RNA, 159 nt, Pectobacterium brasiliense
  source 1..159: mol_type = other RNA; note = Related to NZ_CP009769.1
actctttagcgttaggctttgatttatagccttgtcgagcgttccgccagacactaacttattgagtacttttagggttgcgctagaaagttttctaccgatcctagaagtctctaggatcggtagaaaactttctagcgcctcctctagtaaagagta

SEQ ID NO: 17423 - RNA, 140 nt, Shewanella livingstonensis
  source 1..140: mol_type = other RNA; note = Related to NZ_CP034015.1
gtctttacgcgctagaagcgtgatctgcttcatctggtgtatcactagaagtgtttgattgttagtttttctgagcacggccaccacgaaaatcggcaagccgatttgtcgcggcgtccgtgccctttaaggtaaagata

SEQ ID NO: 17424 - RNA, 140 nt, Shewanella sp.
  source 1..140: mol_type = other RNA; note = Related to JAHKRD010000001.1
aactttacgcgctagaagcgtgacttgcttcatccggtgaatcgctggaactattagattgttgttttttctgagcacggccaccacgaaaatcgcttcgcgatttatcgcggcgtccgtgcccttttaaggtaaagtgt

SEQ ID NO: 17425 - RNA, 141 nt, Aeromonas dhakensis
  source 1..141: mol_type = other RNA; note = Related to NZ_CDBP01000069.1
aactttacgcgtgtgaagcatgcgagcggcttcatctggtgtatcaccggagctttatgattgtgctcatttatgagcacggccaccgcgaaaatcgcttcgcgatttatcgcggcgtccgtgccctttaaggtaaagtat

SEQ ID NO: 17426 - RNA, 139 nt, Vibrio sp.
  source 1..139: mol_type = other RNA; note = Related to CP001805.1
tactttacgcgcttgaagcgtgacctgcttcatctggtgtatcaccggagctttaaattgtgtttttttatgagcacggtcaccacgaaaatcggcaagccgatttgtcgtggcgtccgtgccctttaaggtaaagtta

SEQ ID NO: 17427 - RNA, 139 nt, Vibrio parahaemolyticus
  source 1..139: mol_type = other RNA; note = Related to CP006004.1
tactttacgcgctagaagcgtgaccagcttcatctggtgtatcaccggagctttgtattgtggttttttatgagcacggtcaccacgaaaatcggcgggccgatttgtcgtggcgcccgtgccctttaaggtaaagtac

SEQ ID NO: 17428 - RNA, 135 nt, Marinobacter orientalis
  source 1..135: mol_type = other RNA; note = Related to NZ_SRZX01000002.1
tgtcttacgcgttaagcaatgacagcttaggtctggcgctccgctagatttcacgattgacggtcatgaagtcacgtgatcacgaaacccctaaaacgggctttcgcgctcacgtgcctttctaggtaagcacaa

SEQ ID NO: 17429 - RNA, 142 nt, Legionella pneumophila
  source 1..142: mol_type = other RNA; note = Related to DACSHB010000002.1
tgttttatgcggatttattggttttgctcggcgtttcgctgagctataaattggattggttaaatttataagcgagttattggataaatttaatcaattttgattaaatttatccaataactcgatttcaaagataaaacac

SEQ ID NO: 17430 - RNA, 142 nt, Legionella pneumophila
  source 1..142: mol_type = other RNA; note = Related to DACVYU010000020.1
tgttttatgcggatttattggttttgctcggcgtttcgcagagctataaataggattggttaaatttataaacgagttattggataaatttaatcaaaattgattaaatttatccaataactcggtttcaaagataaaacat

SEQ ID NO: 17431 - RNA, 168 nt, Pseudomonas syringae
  source 1..168: mol_type = other RNA; note = Related to JACYWS010000002.1
ctctttacgcgtttaaagccagacgctagtcgtcgagggcttagtcaggcgtttcgccagactcaatcgcattgcgttgttttattccgcagacaagatctgcggccctacgctccttcgtcgctccggtccacagatcttgtctgcggctgttccttggtaaagagt

SEQ ID NO: 17432 - RNA, 168 nt, Pseudomonas neuropathica
  source 1..168: mol_type = other RNA; note = Related to NZ_JACOPX010000017.1
ctctttacgcgtttaaagccagatactagtcgttgaaggcttagtcaggcgtttcgccagactcaattgcattgcgttgttttattccgcagacaagatctgcggccctacgctccttcgtcgctccggtccacagatcttgtctgcggctgaaccttggtaaagagc

SEQ ID NO: 17433 - RNA, 169 nt, Pseudomonas aeruginosa
  source 1..169: mol_type = other RNA; note = Related to CP089062.2
ctctttacgcgtttaaagctagatgctagtcgctgaaggcttagtcaggcggttcgccagactcaactgtattgcgttgttttattccgcagacaagatctgcggccctacgactccttcgtcgctccggtccgcagatcttgtctgcggctgtaccttggtaaagagc

SEQ ID NO: 17434 - RNA, 169 nt, Pseudomonas promysalinigenes
  source 1..169: mol_type = other RNA; note = Related to NZ_CP077094.1
ctctttacgagtttaaagctagcagctatttgctgaaggcttagtcaggcgcttcgccagactcaatagcattgcgttgttttattccgcagacaagatctgcggccttacgactccttcgtcgctccagtccgcagatcttgtctgcggctgtaccttggtaaagagc

SEQ ID NO: 17435 - RNA, 172 nt, Pseudomonas mosselii
  source 1..172: mol_type = other RNA; note = Related to JACGDE010000010.1
ctctttacgcgtttaaagcttgaagctagtcgctgaaagcttagtcaggcggttcgccagactcaattgcattgcgttgttttattccgcagacaagatctgtggccctacgctcgctactcgctcactccggtccacagatcttgtctgcggctgttccttggtaaagagc

SEQ ID NO: 17436 - RNA, 170 nt, Pseudomonas viciae
  source 1..170: mol_type = other RNA; note = Related to NZ_CP035088.1
ctctttacgcgtttatagctagacggtttccgtcaatggcttagtcaggcggttcgccagactcaattgcattgcgttgttttattccgcagacaagatctgcggccctacgctcgcttcgctcactccggtccacagatcttgtctgcggctgattcttggtaaagagc

SEQ ID NO: 17437 - RNA, 169 nt, Pseudomonas glycinae
  source 1..169: mol_type = other RNA; note = Related to NZ_CP014205.2
ctctttacgcgttcatagcttgatggtttccatcattgcttagtcaggcgcttcgccagactcaattacattgcgttgttttattccgcagacaagatctgcggccctacgctcgcttcgctcactccggtccacagatcttgtctgcggctgattcttggtaaagagc

SEQ ID NO: 17438 - RNA, 169 nt, Pseudomonas parafulva
  source 1..169: mol_type = other RNA; note = Related to NZ_CP031641.1
ctctttacgcgtttaaagctcgaagctagtcgctgaaggcttagtcaggcgattcgccagactcaattgcattgctttgttttattccgcagacaaggtctgcggccctacgactcctccgtcgctccggtccgcagaccttgtctgcggctgtaccttggtaaagagc

SEQ ID NO: 17439 - RNA, 173 nt, Pseudomonas sp.
  source 1..173: mol_type = other RNA; note = Related to NZ_CP019428.1
ttctttacgcgttcaaagcttgatagcagacgctgtcttaaggcttagtcgggcgtttcgccagactcaaaatcattgcttggttttattccgcagacaagatctgcggacctacactcgcaagctccctccggtccgcagatcttgtctgcggctgattcttggtaaagagc

SEQ ID NO: 17440 - RNA, 174 nt, Pseudomonas fluorescens
  source 1..174: mol_type = other RNA; note = Related to NZ_CABVJA010000003.1
ttctttacgcgttcaaagctagtcagcatatgctgtctgaaggcttagtcgggcgtttcgccagactcaaatttattgcttggctttattccgcagacaagatctgcggacactacggtcgcaagctccctccggtccgcagatcttgtctgcggctgattcttggtaaagagc

SEQ ID NO: 17441 - RNA, 171 nt, Pseudomonas proteolytica
  source 1..171: mol_type = other RNA; note = Related to NZ_JAAQXL010000002.1
ctctttacgcgaacaaagtcgaaagaccgttttgtctgaggcttagtcgggcgtttcgccagactcatatgcattgcttggatttattccgcagagaaaatccgcggacctacagtcgcaagctccctccagtccgcgaattttctctgcggctgattcttggtaaagagt

SEQ ID NO: 17442 - RNA, 171 nt, Pseudomonas sp.
  source 1..171: mol_type = other RNA; note = Related to BPLZ01000028.1
ttctttacgcgaatagagccaagggtctcaacaatccacaggcttagtcgggcgcttagccagactcaataatattgcttcgttttgttccgcagagaagttctgcggacctacacatgaagcgcgttccggtccgcagaacttctctgcggctgttccttggtaaagagc

SEQ ID NO: 17443 - RNA, 170 nt, Pseudomonas aeruginosa
  source 1..170: mol_type = other RNA; note = Related to CP041771.1
ttctttacgcgttttgggcttcaagttctagggcttaagctcagtcgggcgcttagccagactcaattgattgtgcagttttattccgcagataagctctgcggccctccggtcgcattcgctccctgcggtccgcagatcttatctgcggctggtccttggtaaagaac

SEQ ID NO: 17444 - RNA, 162 nt, Burkholderia contaminans
  source 1..162: mol_type = other RNA; note = Related to LASC01000001.1
ttctttacgcgaatatagctagaacgatttgcttagcttagtcgggcgtttagccagactcattttcattgcttggttttattccgcagctaacggctgcggccctccaggcgctgccttacggtccacagccgttatctgcggccggttcaggtaaagaac

SEQ ID NO: 17445 - RNA, 162 nt, Burkholderia gladioli
  source 1..162: mol_type = other RNA; note = Related to NZ_CADEWJ010000002.1
ttctttacgcgaatatagctaggacgatttgtatagcttagtcgggcgtttagccagactcaattttattgcttggttttattccgcagctaacggctgcggccctccaggcggagccttacggtccgcagccgttagctgcggccggttcaggtaaagaac

SEQ ID NO: 17446 - RNA, 169 nt, Cupriavidus necator
  source 1..169: mol_type = other RNA; note = Related to NZ_CP017757.2
ttctttacgcgaatagagcctgtgtcgaaattgaatacagcttagtcgggtgtttagccagactccatttgattgcttggacttattccgcagataaggtctgcggtcctccagtcgcaagcgccctccggcccgcagcccttatctgcggacgttctaggtaaagaac

SEQ ID NO: 17447 - RNA, 179 nt, unidentified
  source 1..179: mol_type = other RNA; note = Related to QFXG01000005.1; note = Candidatus Nitrotoga sp. SPKER
ttctttacgtgaataaagcttattaaggttgtttgcttaataacttagtcgggtgtttagccagactctatataaattgtgtggatttaggccgcagataatttctgcggctctccgttcgcaaaatcagctctctacgatccacagaaattatctgcggcacgttctaggtaaagaac

SEQ ID NO: 17448 - RNA, 173 nt, Acidithiobacillus ferrooxidans
  source 1..173: mol_type = other RNA; note = Related to JABFOH010000005.1
ttctttacgtgaataaagcttattaaggttgttaacttaatggcttagtcgggcgtttagccagactctattatattgtatggacttaggccgcagatagtttccgcggttctccgttcgcaagctctctacgatccgcggaaactatctgcggcacgttctaggtgaagaac

SEQ ID NO: 17449 - RNA, 170 nt, Marinimicrobium koreense
  source 1..170: mol_type = other RNA; note = Related to NZ_RJUK01000001.1
tcttccacgagaacagagctttatactttataaaagcttagtcgggtgtttagccagactctacttgcattgcgtggttttattccgcagataacatctgcggatctccaatcgcgccagcgctcattacgatccacagatgttatctgcggagatcagaggtgggagaa

SEQ ID NO: 17450 - RNA, 146 nt, Cellvibrio sp.
  source 1..146: mol_type = other RNA; note = Related to MVDH01000001.1
gcttttacgtgaataaagcctatggcttagtcgggtgtttagccagactctattttattgggtggttttattccgcagataacatctgcgtatctccacttcgttacgatccacagatgttatctgcggacgcttaggtaaaagct

SEQ ID NO: 17451 - RNA, 167 nt, Pseudomonas sp.
  source 1..167: mol_type = other RNA; note = Related to NZ_BQIK01000019.1
ctctttacgcgtttgctttatgctttttagctaaagctagtcgggcgtttcgccagactctactgagattggttagatttattccgcagagaatttccgcggacctccagtcgcaagctccgttccgatccgcgaaaattctctgcggccggatcttggtaaaggca

SEQ ID NO: 17452 - RNA, 166 nt, Pseudomonas alliivorans
  source 1..166: mol_type = other RNA; note = Related to JAFFZW010000005.1
ttctttacgcgtacaagctcggtctcggtaccgatgcttagtcgggcgattagccagactctagaaaattgcttggatttattccgcagagaatatctgcggccctccaatcgcgggctcattacggtccacagatattctctgcggctgtttcttggtaaagaac

SEQ ID NO: 17453 - RNA, 165 nt, Pseudomonas sp.
  source 1..165: mol_type = other RNA; note = Related to MSXW01000061.1
ttctttacgcgtaaaagctaggctgcacagccagagcttagtcaggcgcttcgccagactctatgaaattgtttggttttattccgcagacgaaatctgcggccctccaatcgcaagctcattacggtccacagattccgtctgcggctgtccttggtaaagaat

SEQ ID NO: 17454 - RNA, 163 nt, Pseudomonas stutzeri
  source 1..163: mol_type = other RNA; note = Related to POUU01000009.1
ttctttacgcgtatagctaggctgtaagccagagcttagtcgggcgcttagccagactctatgaaattgtttggatttattccgcagagaatctctgcggccctccactcgcaagctccctacggtccacagagattctctgcggccgttcttggtaaagaaa

SEQ ID NO: 17455 - RNA, 176 nt, unidentified
  source 1..176: mol_type = other RNA; note = Related to SDYH01000002.1; note = Alphaproteobacteria bacterium
gtctttacgcgaacagagcgtttacacgttacaacgttgcaaaagcttagtcgggcgtttagccagactcatatttattgcttggtcttaagccgcagagcttctccgcggtcctacattcgacaagctctctccggcccgcggagaatctctgcggctgatttcaggtgaagaca

SEQ ID NO: 17456 - RNA, 170 nt, Polynucleobacter wuianus
  source 1..170: mol_type = other RNA; note = Related to JACVPK010000010.1
ttctttacgatgatattgctttaatagtatttatattaggcatagtcgggcgtttagccagactctatttgattgtttggatttaatccgcagattcgctccggatgcctccaagcaaaaccagctttacggcctccagaccaaatctgcggctcgttcaggtaaagagc

SEQ ID NO: 17457 - RNA, 174 nt, Janthinobacterium sp.
  source 1..174: mol_type = other RNA; note = Related to JACYMM010000001.1
ttctttacgcgaataaaattgccgacattcatcatcgtttgcaatttagtcgggcgattagccagactctattttattgcttggacttgagccgcagcgacaatttgcggccctacgttcggcgagctctctccagtccgcaaattgtcgctgcggctgttctaggtaaagaac

SEQ ID NO: 17458 - RNA, 168 nt, Janthinobacterium agaricidamnosum
  source 1..168: mol_type = other RNA; note = Related to NZ_CP033019.1
ttcttcacgcgaatgtggttacgaaagtatccgtaacttagtcgggcggttagccagactctatatgattgtggcgacatgagccgcagcggcattttacggccctacgctcgctcacgctcgactccgatccgcaaaatgccgctgcggcttttctaggtgtagaac

SEQ ID NO: 17459 - RNA, 171 nt, Duganella radicis
  source 1..171: mol_type = other RNA; note = Related to NZ_WNKY01000042.1
ttctttacgcgaataaagactcatctttcgagatgtagccttagtcgggcgattagccagactctatgggattgattggacttgagccgcagcgaaaatttgcggccctacaatcggctccgcctcattccggtccgcaaatttccgctgcggcttttctaggtgaagaat

SEQ ID NO: 17460 - RNA, 173 nt, Duganella sp.
  source 1..173: mol_type = other RNA; note = Related to LRON01000007.1
ttctttacgcgaacaaagactcatctcattgagatgttggcttagtcgggcgattagccagactctattggattgatctcacttgagccgcagcgaaaatttgcggccctacaatcggcttgcgcctcattccggtccgcaaatttacgctgcggcttttctaggtgaagaat

SEQ ID NO: 17461 - RNA, 161 nt, Burkholderia stabilis
  source 1..161: mol_type = other RNA; note = Related to NZ_CP016442.1
ttctttacgcgaacagagctaggcagcttttaggttttagcttagtcgggcgattagccagactccttttgattgggcggccctattccgcggataagctctgcggccctccgcccgctacggtccgcagagcttatccgcggccgttctaggtaaagaac

SEQ ID NO: 17462 - RNA, 168 nt, Burkholderia gladioli
  source 1..168: mol_type = other RNA; note = Related to NZ_CADEZN010000001.1
ttctttacgcgaacacggctagacaccgttgtgccttagcttagtcgggcgattagccagactctttttgattggacggtcctattccgcggataagctccgcggccctccgttcgtgtcctcactacggtccgcagagcttatccgcggccgttctaggtaaagaac

SEQ ID NO: 17463 - RNA, 155 nt, Acidovorax sp.
  source 1..155: mol_type = other RNA; note = Related to JAGMZN010000009.1
gctttttagctaaagacttaaaagcttagtcgggcgctccgccagactctatttcattgtttggatttattccgcagagaagctctgcgagcctacgttcgcaagctctctccgactcgcagatcttctctgcggtcgattcttggtaaagacac

SEQ ID NO: 17464 - RNA, 164 nt, Methylomonas sp.
  source 1..164: mol_type = other RNA; note = Related to NZ_KI911557.1
ttctttacgcgaataaagcttaaaagtataaacatacttagcttagtcgggcgtttagccagactctttagaattgcttggacttattccgcagatacactctgcggccctccgtttgcactccggtccacagagtgtatctgcggttgatcttggtaaagaac

SEQ ID NO: 17465 - RNA, 174 nt, Halomonas qijiaojingensis
  source 1..174: mol_type = other RNA; note = Related to NZ_BMXS01000014.1
gttctttagcgtttctgactaacaagtactgtttgacttgttagtttagtcgggcgattagccagactcaaaatattgcttggttttatgaccgcagatgacttctgcggatctacattcgcaagctcattccgatccgcagaagtcatctgcggccggttcaggtaaaggaca

SEQ ID NO: 17466 - RNA, 172 nt, Alcanivorax profundimaris
  source 1..172: mol_type = other RNA; note = Related to JABJWH010000040.1
gctctttagcgtttgagcttacacattaatcgtgctgtgagcttagtcgggcgataagccagactcaaagtattgcttgcatttatggccgcagataccttctgcggctctacattcgcaagctcattccgacccgcagaaggtatctgcggccggcttcaggtaaagagct

SEQ ID NO: 17467 - RNA, 169 nt, Pseudomonas aeruginosa
  source 1..169: mol_type = other RNA; note = Related to VOJF01000050.1
gtccttacgcgatcatagccacaagggactcccttaaggcttagtcgggcgcttcgccagactcaaatgcattgcttcgatttattccgcagagaatgtctgcgggcctacgatcgcaagcgatctccaacccgcagccatcctctgcgggcggtccgaggtgagggca

SEQ ID NO: 17468 - RNA, 169 nt, Pseudomonas aeruginosa
  source 1..169: mol_type = other RNA; note = Related to NZ_UATW01000001.1
gtccttacgcgatcaaagccacaaggtacgcccttaaggcttagtcgggcgtttcgccagactcaaatgcattgcttcgatttattccgcagagaatgtctgcgggcctacgatcgcaagcgatctccgacccacagacattctctgcgggcggtccgaggtgaggaca

SEQ ID NO: 17469 - RNA, 169 nt, Pseudomonas sp.
  source 1..169: mol_type = other RNA; note = Related to NZ_CP015992.1
gtctttacgcgattaaagcctacagttctctaacttgtggcttagtcaggcgatacgccagactcaaatgcattgcttggttttattccgcagagaagatctgcgggcctacactcgcaagctcattccgacccgcagatcttctctgcggctgtccgaggtaaagaca

SEQ ID NO: 17470 - RNA, 156 nt, unidentified
  source 1..156: mol_type = other RNA; note = Related to PBYC01000020.1; note = Oceanospirillaceae bacterium
gactttacgcgaataaagccagttggcttagtcaggcgaatcgctagactctattttattgcgatgttttatcccgcagatatcacctgcggctatccgttcgcaagctcactactatccacaggcaatatctgcggttggtacaaggtaaagtac

SEQ ID NO: 17471 - RNA, 156 nt, Thalassolituus oleivorans
  source 1..156: mol_type = other RNA; note = Related to JALE01000028.1
aactttacgcgaatagagccatttggcttagtcaggcgaatcgctagactctatgttattgcgaagatttatcccgcagatatgtgctgcggttatccgttcgcaagctcactactaaccacaccccacatctgcggttggtacaaggtaaagtta

SEQ ID NO: 17472 - RNA, 150 nt, Halomonas sp.
  source 1..150: mol_type = other RNA; note = Related to DNYL01000221.1
ccttttacgcgtacagaaatagccgggtgtatagccaggctcaaaagaaattgggtatatttaatccgcatgtcttgctgtgtggcttgctgcggaaccccatgcagcaagccacacagcaagacatgcggctgcatcttggtaagaggt

SEQ ID NO: 17473 - RNA, 150 nt, Halomonas alkaliantarctica
  source 1..150: mol_type = other RNA; note = Related to NZ_SOCZ01000001.1
ccttttacgcgttcagtatttgccgggtgtatagccaggctcaaatgaaattgggtatatttaatccgcatgtcttgctgtgtggcttgctgcggaaccccatgcagcaagccacacagcaagacatgcggctgcatcttggtaagagga

SEQ ID NO: 17474 - RNA, 165 nt, Kushneria phyllosphaerae
  source 1..165: mol_type = other RNA; note = Related to NZ_ONZI01000001.1
ctttttacgcgttcattagcaattttttagctatagccgggtgtatagccaggctcaaaagcgattggagagatttattccgcatagaaatgctgcgggttttcgctccgcttcgctccactcgaacccgcagcatttctatgcggctgcttcgtggtaaaaagc

SEQ ID NO: 17475 - RNA, 168 nt, Serratia marcescens
  source 1..168: mol_type = other RNA; note = Related to CP026050.1
gctctaaacgtgtatggcatatttagttatgcttgtcgggcgcttagccagacacttttatattgaacggctttagggttgcgcttggtgtgcctctggattgcactcctagttgcacgtcgtcgcgcaatccagaggcacaccaagcgcttcctctaggtaagagca

SEQ ID NO: 17476 - RNA, 165 nt, Pantoea agglomerans
  source 1..165: mol_type = other RNA; note = Related to CP034474.1
gctctttagcgtggtatggatttcaccactcaacggttaaatctagttcggcgttacgcagaactctaacttattgattatatttacagttgcggaacaaaatttctgaaccgcagccgtagttgcggatcagaaattttgttccgcggctactagtaaagagca

SEQ ID NO: 17477 - RNA, 152 nt, Pontibacter actiniarum
  source 1..152: mol_type = other RNA; note = Related to NZ_CP021235.1
ttgaattagtttttaaactttaatttaattaaagttttgtcgggtgtaaaccagacacttattgtattttttacctttggaagcaagctaataagctgttgctccccaaggggagcaacagcttattagcttgcttccctttgtaattcgat

SEQ ID NO: 17478 - RNA, 142 nt, Lysobacter enzymogenes
  source 1..142: mol_type = other RNA; note = Related to NZ_RCTY01000045.1
taggtttatcgcataccagcgaccaggagtagctccggtctaatgtctggtccctagggcgttttatcaatttacgtatgcccggtcgctggcccacgcccgaccgggcatttcgtatgtgcattcgtgactggcaatcgac

SEQ ID NO: 17479 - RNA, 138 nt, Stenotrophomonas nitritireducens
  source 1..138: mol_type = other RNA; note = Related to LDJG01000003.1
taggcttttgccataccagcgactaggagtagctccggtctaaggtctggtccctagggcgttttatcaacttacgcatgcccggtcgcaggctaacgcccgaccgggcatttcgtttttgcagctctagccggtaat

SEQ ID NO: 17480 - RNA, 142 nt, Xanthomonas translucens
  source 1..142: mol_type = other RNA; note = Related to NZ_LNSU01000266.1
taggattttcgcataccagcgactaggagtagctccagtctaatgtctggtccctagggcgtttcatcaacttacgcatgcccggtcgcaggctaacgcccgaccgggcatttcgtatgtgcggtcctggcccgtaatgggc

SEQ ID NO: 17481 - RNA, 145 nt, Xanthomonas campestris
  source 1..145: mol_type = other RNA; note = Related to AM920689.1
tagagttttttcataccagcgactaggagtagctccggtctaatgtctggtccctagggcgtttcatttatttacgtgtgcccggtcgcaggctaacgcccgaccgggcatttcgtttgtgcagtcctagcaggtaatcggatac

SEQ ID NO: 17482 - RNA, 148 nt, Xanthomonas campestris
  source 1..148: mol_type = other RNA; note = Related to LOKH01000144.1
tagggtttacgcataccagcgaccaggagtagctccggtagctccggtctaatgtctggtccctagggcgtttcatcaacttacgcatgcccggtcgcaggctgaagcccgaccgggcatttcgtatgtgcagtgtcggccatcaatc

SEQ ID NO: 17483 - RNA, 145 nt, Pseudoxanthomonas sp.
  source 1..145: mol_type = other RNA; note = Related to FPCI01000001.1
taggtttaccccacaccagcgaccaggagtagctccggtctaatgcctggtccctacggcgttttatcaatttacgtatgcccggtcgaaggcccatgtccgaccgggcatttcgtatgcgcagttctcctcggcaatcggctac

SEQ ID NO: 17484 - RNA, 143 nt, Xanthomonas translucens
  source 1..143: mol_type = other RNA; note = Related to CP076254.1
taggctttttccataccagcgactaggagtagctccagtctaatgtctggtccctagggcgttttatcaacttacgcatgcccggtcgcaggcttacgcccgaccgggcatttcgtatgtgcgctttagaaggggcaatcggc

SEQ ID NO: 17485 - RNA, 147 nt, Achromobacter sp.
  source 1..147: mol_type = other RNA; note = Related to NZ_FNYM01000002.1
taacctcttttcataccagcgactaggagtagctccagtctaatgtctggtccctagggcgatttatcacatttacgaatacccggtcgaggctcacacccggccgggtttttcgtatgtactttccgcgttcctatcgattagcga

SEQ ID NO: 17486 - RNA, 143 nt, Alcaligenes aquatilis
  source 1..143: mol_type = other RNA; note = Related to NZ_CP032153.1
tagagtcaaagcataccagcgactaggagcagctccagtcaaacgtctggtccctagggcgttttattaaatttacgcatgcccggtcgatggcgaaagcccgaccgggcgtttcgtatctgccagtagttaagtgtctatca

SEQ ID NO: 17487 - RNA, 144 nt, Stenotrophomonas sp.
  source 1..144: mol_type = other RNA; note = Related to NZ_PKQQ01000003.1
taggatttttgcataccagcgactaggagtagctccagtcaacagtctggtccctagggcgtttcatcaatttacgcatgcccggtcgcaggctcacgcccgaccgggcatttcgtttgtactctccgaaggcgctcgtggcga

SEQ ID NO: 17488 - RNA, 142 nt, Stenotrophomonas bentonitica
  source 1..142: mol_type = other RNA; note = Related to NZ_PKQP01000016.1
taggattttttcataccagcgactaggagtagctccagtcaacagtctggtccctagggcgtttcattgatttacgcatgcccggtcgcaggctcaggcccgaccgggcatttcgtatgtgccgccccaagcgacaatcggc

SEQ ID NO: 17489 - RNA, 143 nt, Massilia lurida
  source 1..143: mol_type = other RNA; note = Related to NZ_VLLB01000004.1
tagaatttttgcataccagcgactaggagcagctccggtctaatgtctggtccctagggcgatttatgaatttacgtgtgcccggtcgctggctagcgaccgggcatttcgtatttgggattcgatccgaagaggtcaacgcc

SEQ ID NO: 17490 - RNA, 144 nt, Acidithiobacillus thiooxidans
  source 1..144: mol_type = other RNA; note = Related to SZUV01000002.1
tataatctttctacaccagcgactaggagtagctccggtcaaatgtctggtccctagggcgttttatcaacttacgtatgcccggtcgcaggcttatgcccgaccgggcatttcgtatgcgttacctacagactacaatcaact

SEQ ID NO: 17491 - RNA, 143 nt, Orrella marina
  source 1..143: mol_type = other RNA; note = Related to NZ_CP028901.1
tacagtttttccataccagcgactaggagtagctccagtctaatgtctggtacctagggcgttttatcaacttacgcgtgcccggtcgaaggcttgtgctatgttcggccgggtatttcgtaaatgccaacgggctgcagtca

SEQ ID NO: 17492 - RNA, 146 nt, Pseudomonas aeruginosa
  source 1..146: mol_type = other RNA; note = Related to CP053705.1
tatgcttttcttacaaaccagcgactaggagtagctccagtctaatgtctggtaggtagggcgttttatctaacttacgcatgcccggtcgcaggcttacgcccgaccgggcatttcgtatgcgttatttacaggatgtagacagc

SEQ ID NO: 17493 - RNA, 143 nt, Methyloversatilis discipulorum
  source 1..143: mol_type = other RNA; note = Related to JADMJL010000080.1
tacgctttttctataccagcgactaggagtagctccggtctaatgtctggtccctagggcgttttatctacttacgcatgcccggccgcaggctaacgcccggccgggcgtttcgtatctgtcatttgcaggctgctattagt

SEQ ID NO: 17494 - RNA, 144 nt, Halomonas sp.
  source 1..144: mol_type = other RNA; note = Related to CP086344.1
tactgtaaaaacataccagcgactaggagtagctccagtctaaagtctggtccctaggtggttttatccgcttacgtatgctcggtcaatggctttcgcctgaccgagcatttcgtatgtgcagaggaaagtacatatttatta

SEQ ID NO: 17495 - RNA, 147 nt, Lysobacter sp.
  source 1..147: mol_type = other RNA; note = Related to NZ_JAKPBV010000013.1
tagcctgttgtcatgccagcgactaggagtagctccggtcaacagtctggcctctatggcgctttagcaacttacgtatgcccgacctcaaggcctcgtgccgggtcgggcatttcgtttgtgctccaatatccaccatgacagatc

SEQ ID NO: 17496 - RNA, 147 nt, Burkholderia cepacia
  source 1..147: mol_type = other RNA; note = Related to LPEM01000032.1
tagaatgcattcatgccagcgactaggagtatcctccagtcccaagtctggcctctaccgggtctgcatccatttacgtgtgggcgattccttaatgctaaggagtcgcccatttcgtatgtgctttgcgtgtaagcactctccccc

SEQ ID NO: 17497 - RNA, 145 nt, Burkholderia gladioli
  source 1..145: mol_type = other RNA; note = Related to NZ_UWYX01000002.1
tagaatgttcctatgccagcgactaggagtatcctccagtcccatgtctggcctctaccgggtctgcatccatttacgtgtgggcgattccttattattaaggagtcgcccatttcgtatgtgtattgcgtgcaagcgccccttc

SEQ ID NO: 17498 - RNA, 146 nt, Paraburkholderia heleia
  source 1..146: mol_type = other RNA; note = Related to NZ_BBJH01000023.1
tatagtaggatcatgccagcgaccaggagtatcctccggtccgaagtctggcctctaccgggtctgcatatatttacgtgtgggcgacgccttaaatttaaggggtcgcccatttcgtatgtgcgcggcacggcgctccgtcctat

SEQ ID NO: 17499 - RNA, 146 nt, Paraburkholderia sp.
  source 1..146: mol_type = other RNA; note = Related to VZQP01000011.1
tagaatggtgctatgtcagcgactaggagcatcctccggtctgaagtctggcctctaccgggtctgcatttacttacgtgtgggcgattccttagtgttaaggagtcgcccatttcgtatgtgctccgcgtgcaagctccgctctc

SEQ ID NO: 17500 - RNA, 144 nt, Caballeronia sp.
  source 1..144: mol_type = other RNA; note = Related to NZ_JAAVUQ010000005.1
tacaatgcactcacgccagcgaccaggagtatcctccggtcaaacgtctggcctctacccggtctgcatccagttacgtgtgggcgattccttaaattaagggatcgcccatttcgtatgcgtttcgttcgcgggcaaatctcc

SEQ ID NO: 17501 - RNA, 146 nt, Paraburkholderia ribeironis
  source 1..146: mol_type = other RNA; note = Related to NZ_CYGX02000017.1
tacaataaggttatgtcagcgaccaggagcattctccggtcatatgtctggcctctaccgggtctgcatccatttacgtgtgggcgattccttgatgacaaggagtcgcccatttcgtatgggcctcccggtcagtccggttcgcc

SEQ ID NO: 17502 - RNA, 143 nt, Burkholderia sp.
  source 1..143: mol_type = other RNA; note = Related to NZ_CP045094.1
tagaataagaccatgccagcgactaggagtatctccagtcttaggtctggcctctaccgggtctgcatcaatgttacgtgtgggcgatttcttgatttcaaggagtcgcccatttcgtatgaaagtccaatcgtttcgaactg

SEQ ID NO: 17503 - RNA, 140 nt, Janthinobacterium sp.
  source 1..140: mol_type = other RNA; note = Related to JAHYBY010000004.1
tataattagcacatgccagcgactaggagcatctccagtcacattgctggcctctagggtgttgtctatttacggttgtgcggtgcctttttgtgtggcaccgcacaatttgtaatttcagatattccgccctactccaa

SEQ ID NO: 17504 - RNA, 146 nt, Trinickia diaoshuihuensis
  source 1..146: mol_type = other RNA; note = Related to NZ_QUBS01000013.1
taggctactgttatgccagcgactaggagtatctccagtcttatgtctggcctctcccggctctgcatccactttacgattgggcggtgcgcctctttgaggtcgccgcccaaattgtaaatgctgtcaaaaagcgagaccttctc

SEQ ID NO: 17505 - RNA, 145 nt, Caballeronia sp.
  source 1..145: mol_type = other RNA; note = Related to JAJUBG010000007.1
tatgctctttgcatgccagcgactaggagcatctccggtctcaagtctggcctctcccggctctgcatccactttacgattgggcggtgcgcttcttcgaggccgccgcccaaattgtaactgctgccggcaacccccttctcgc

SEQ ID NO: 17506 - RNA, 159 nt, Pseudomonas sp.
  source 1..159: mol_type = other RNA; note = Related to JAEKFF010000008.1
tactatgcctctatgtcagtgactaggggtatctccagtcgttaagctgacctctagaggtcttgatccatgttacgtttgtatggcctccctgctaggttatcgtttgagcagggtggccatgcgaattgtaaagtttgctcccttccgcatcttctc

SEQ ID NO: 17507 - RNA, 157 nt, Pseudomonas viridiflava
  source 1..157: mol_type = other RNA; note = Related to NZ_UUGY01000017.1
tagcctcaacctatgtcagtgactaggggtatctccagtcgttaagctgacctctagaggtcttgatcaatgttacatttgtgtggtctccctgttaaattttggtttaaacggggagaccatgcggattgtaaaatatatatattttgtttcactt

SEQ ID NO: 17508 - RNA, 160 nt, Pseudomonas shirazensis
  source 1..160: mol_type = other RNA; note = Related to NZ_JABWRD020000002.1
taccatgaccccatgtcagtgactaggggtatcctccggtcaataagctgacctctagaggtcttgatccatgttacatttgtatggcctccctgctctgtagtcgtttgagtggggggccatgcagactgtaaacgcctctataagtcctctcctccgc

SEQ ID NO: 17509 - RNA, 160 nt, Pseudomonas aeruginosa
  source 1..160: mol_type = other RNA; note = Related to CP047592.1
taccatgaccccatgtcagtgactaggggtatcctccagtcatcaagctgacctctagaggccttgatccatgttacatttgtatggcttccctcctcgttcaccatttgagttgggaagccatgcagactgtaaaatcccgtctcctctgcagctctcc

SEQ ID NO: 17510 - RNA, 152 nt, Pseudomonas lutea
  source 1..152: mol_type = other RNA; note = Related to NZ_JACYNP010000006.1
tacgatcgctccatgtcagcgatttggggtatccccggtcgtaagctgacctctacaggacttgatccttgttacatttgtctacctcccgggtgcggttgtgcccgggaggtaggacaaactgtaaacaccgtactaccccctctaaatat

SEQ ID NO: 17511 - RNA, 147 nt, Pseudomonas fluorescens
  source 1..147: mol_type = other RNA; note = Related to NZ_CABVHI010000016.1
taggattgccgcatgtcagcgatttggggtatccccggtcgtaagctgacctctacaggacttgatccatgttacatttgtgtaccttcccaggttgctgggaaggctacacaaactgtaaatcctgctcctattaacaccttctac

SEQ ID NO: 17512 - RNA, 152 nt, Pseudomonas jessenii
  source 1..152: mol_type = other RNA; note = Related to FNTC01000002.1
tagtatctgtggcatgtcagcgattggggaatcttccagtcgtatgctgacctctacaggccttgatccgtgttacatttgtgtgcctcctacgtactcagcgtcgggaggttacacaaactgtaagcctctccctcctatcctctcgtact

SEQ ID NO: 17513 - RNA, 153 nt, Pseudomonas sp.
  source 1..153: mol_type = other RNA; note = Related to NZ_CP052862.1
taggatctcttcatgtcagtgactaggagcatctccagtctcaagctgacctctaaaggcctgtatccgagttacttttgtgtgacttccccaatctgctgattgagggaagccgcacgaacagtaaaatttgcgttacccgtaacccccttc

SEQ ID NO: 17514 - RNA, 151 nt, Pseudomonas asplenii
  source 1..151: mol_type = other RNA; note = Related to NZ_LT629777.1
tacgatctttgtatgtcagtgactaggagtatctccagtcgcaagctgacctctagaggcctgtatccgtgttacttttgtgtgacttccccattttcttgactggggaagccgcacgaatagtaaagcagcccttattttttctcccccc

SEQ ID NO: 17515 - RNA, 159 nt, Pseudomonas sp.
  source 1..159: mol_type = other RNA; note = Related to NZ_LT607553.1
tacgatcagttcatgtcagtgactaggagtatctccagtcgcaagctgacctctaaaggcctgtatccgatttacttttgtgtgaagccccctctgtctagctttggctaacggttgggggacacacaaatagtaaacttaagtcttaatccgaaatct

SEQ ID NO: 17516 - RNA, 141 nt, Luteimonas sp.
  source 1..141: mol_type = other RNA; note = Related to NZ_CP089507.1
taccatcgggtcatgtcagcgaccaggagcatctccggtcaccagtctgacctctaggccgtttaattaactttacatttgcgcggtctgcatttggcaggccgcgcgaactgtaaaacaacagcctacttatgtgtctgc

SEQ ID NO: 17517 - RNA, 176 nt, Pseudomonas cichorii
  source 1..176: mol_type = other RNA; note = Related to NZ_QPDS01000008.1
taccatcctgctcatgtcagcgactaggagtatctccagtcggtttggaatgctggcctctacaggtgtctagtctccgtcttacgtttgtgtaggtctatgctgggtctgggtgagtaactgactgcatagacctacacggatagtaaggagtcgtaataagcatcaatgagttc

SEQ ID NO: 17518 - RNA, 159 nt, Pseudomonas anatoliensis
  source 1..159: mol_type = other RNA; note = Related to NZ_JACVHC010000006.1
tatagtctcttcatgccagtgactaggagtacctccagtcggtttggaatgctggcctctacaggtgtctagtctccgtcttacgtttgtgtgggttaatgctgagcaaaacggcattggcctacacagatagtaagggctatcaagtcccggttcagc

SEQ ID NO: 17519 - RNA, 171 nt, Pseudomonas sp.
  source 1..171: mol_type = other RNA; note = Related to NZ_CP023969.1
tatcatccacgcatgtcagtgactaggagtatctccggtcggtttgtaatgctggcctctacaggtgtctagtttccgtcttacgtttgtgtaggtttatgcttggtggaaatattctactaacataagcctacacagatagtaaggaacacttcctccgcctcccagcac

SEQ ID NO: 17520 - RNA, 161 nt, Pseudomonas sp.
  source 1..161: mol_type = other RNA; note = Related to RHQR01000004.1
tatgatcaggtcatgccagtgactaggagtatctccagtcggtttggaatgctggcctctacaggtgtctagtctccgtcttacgtttgtgtaggtttatgttgaaaacagcatatgcctgcacagatagtaaggagcaaaaattagattctccgtagctt

SEQ ID NO: 17521 - RNA, 159 nt, Pseudomonas sp.
  source 1..159: mol_type = other RNA; note = Related to JAEKED010000001.1
tatgatctgatgcatgtcagtgactaggagaatctccagtcggtttggaatactggcctctacaggtgtctagtctccgtcttacgtttgtgtagggttatgcagggtaagtaactgcataaccttgcacagatagtaaggagccctccagcagcacct

SEQ ID NO: 17522 - RNA, 153 nt, Pseudomonas syringae
  source 1..153: mol_type = other RNA; note = Related to LIHT01000076.1
tatatttgcctcacgccagcgactaggagcagctccagtcaataatgttggcctctacaggtatctagtctccgtcttacgtttgtgcatgctgagtggtcgtaggccagtcagcatgcacggatagtaagggtaatatctctgacatcccgc

SEQ ID NO: 17523 - RNA, 156 nt, Pseudomonas sp.
  source 1..156: mol_type = other RNA; note = Related to PGRY01000001.1
tatagtcagtgcatgtcagcgactaggagcatctccagtcacaaatgctggcctctataggtgtctagtctccttcttacgctgcgaggggttcatttgaatatttttgaactcctcgcatgtagtaagcccaaaaagaactgctaactactttct

SEQ ID NO: 17524 - RNA, 164 nt, Pseudomonas aeruginosa
  source 1..164: mol_type = other RNA; note = Related to CP017149.1
tatgatcaccttatgccaagactaggagcagctccagtcacaaatggcctctacagtcgtctagtctcctgtttacgtttgtgttgccctttaggctcggctcgggctcgatgcctaaagggcttcacaaatagtaaatccccgctccccgctccccgctcccc

SEQ ID NO: 17525 - RNA, 141 nt, Duganella sp.
  source 1..141: mol_type = other RNA; note = Related to JAHTGR010000011.1
tagaatagcggcatgtcagcgactaggagcatctccagtcttgagcctgacctctatcgggtatgattaagttacgattgtgcgtgtcccaagttggggcacgcacatattgtaaatttttctccctatcactttccctcc

SEQ ID NO: 17526 - RNA, 154 nt, Pseudomonas sp.
  source 1..154: mol_type = other RNA; note = Related to LIRD01000002.1
tagagtcatcccatgccagtgactaggagcatctccagtcatcagatctggcctctacaggtatctagtctccgctttacatttgtgtgcctctctagcgaatggctaaagaggcacataaatagtaaatactcttgatcgatttctcttctcc

SEQ ID NO: 17527 - RNA, 153 nt, Pseudomonas sp.
  source 1..153: mol_type = other RNA; note = Related to NZ_MUNM01000090.1
tagagtcggcctatgccagtgactaggagtatctccagtcgccaaatctggcctctacaggtgtctagtctccgctttacgtttatgtgcctctctagcaaaaggctaaagaggcacataaatagtaaatatcttcttgattttcgctgctct

SEQ ID NO: 17528 - RNA, 155 nt, Pseudomonas sp.
  source 1..155: mol_type = other RNA; note = Related to AKJS01000163.1
tagagtcggtctatgccagtgactaggagtatctccagtcgccaaatctggcctctacaggtgtctagtctccgctttacgtttatgtgcctctctagcaataagctaatgaggcacataaatagtaaagatctccgttttatcctcctagctac

SEQ ID NO: 17529 - RNA, 153 nt, Pseudomonas sp.
  source 1..153: mol_type = other RNA; note = Related to NZ_FYEA01000001.1
tagagtccgactcatgccagtgactaggagcatctccagtcatcaaatctggcctctacaggtgtctagtctccttttacgtttgtgtgtctctctagcagtcagctaggaggcacacagatagtaaactctgcctttcaagcaggcgtattc

SEQ ID NO: 17530 - RNA, 150 nt, Pseudomonas gozinkensis
  source 1..150: mol_type = other RNA; note = Related to NZ_CP062253.1
tacagtccgagtcatgccagtgactaggagcatctccagtcatcaaatctggcctctacaggtgtctagtctccttttacgtttgtgtgccttttagcgttgagctaagaggcacacaaatagtaaaacctcctacgcaagcagacagtt

SEQ ID NO: 17531 - RNA, 146 nt, Pseudomonas monsensis
  source 1..146: mol_type = other RNA; note = Related to NZ_CP077087.1
tagagttcgactcatgccagtgactaggagcatctccagtcatcaaatctggcctctacaggtgtctagtctccttttacggttgtgtgcctctttagcgaaacgctaagaggcacacaaattgtaaactttgttttcttggttac

SEQ ID NO: 17532 - RNA, 154 nt, Atopomonas hussainii
  source 1..154: mol_type = other RNA; note = Related to NZ_MPIO01000005.1
tatactgcatgcatgtcagcgactaggagcatctccagtcatcagcctgacctctagtcgcctttatctggttttactgttgtgtggctcgctagcgaaatcctctagcgagccacacaaatagtaaaaaatccagttttctgcttttgcatct

SEQ ID NO: 17533 - RNA, 148 nt, Pseudomonas azerbaijanoccidens
  source 1..148: mol_type = other RNA; note = Related to NZ_JAHSTU010000002.1
tatcatttgggcatgtcagcgactaggagtatctccagtcattcagctggcctctacatgcctttagttatttactgttgtgtggttcccttctcaaatcgagggggagccacacgaatagtaaggcttgtactccatctagcagctc

SEQ ID NO: 17534 - RNA, 143 nt, Pseudomonas sp.
  source 1..143: mol_type = other RNA; note = Related to SCFF01000003.1
tatgatttaggtatgtcagcgactaggagcatctccagtcatccagctggcctctacaggtctatatccggttactgttgtgtggtcatcctatctttgggatggccacacgaatagtaatgtttattttgatgtcaagaatt

SEQ ID NO: 17535 - RNA, 150 nt, Pseudomonas veronii
  source 1..150: mol_type = other RNA; note = Related to NZ_CP039631.3
tatcattggcgcatgtcggcgactaggagtatctccagtcactcagctgaccgctacaggcctttaattgtttactgttgtgtggtctttccattttttggtgggaaggccacacgaatagtaaggccgaaatggtatcaaaaacctttc

SEQ ID NO: 17536 - RNA, 134 nt, Aquabacterium sp.
  source 1..134: mol_type = other RNA; note = Related to JADMKF010000239.1
tacactatacgcatgtcaacgactaggagcatctccagtcagctatgttgacctctaggccgtctgatctacttgtgtggcgcccccttgcggggcgccacacaagacgtagaacgaaacggacgacgcccgcc

SEQ ID NO: 17537 - RNA, 146 nt, Delftia tsuruhatensis
  source 1..146: mol_type = other RNA; note = Related to NZ_FOKN01000013.1
tacactatacccatgtcaacgaccaggagcatctccggtcgctagtcactgactaaagttgacctctaggccgtctgatctacttgtgtggcgtactgttcagtacgccacacaagctgtagagtccactcagacccgcgcccccc

SEQ ID NO: 17538 - RNA, 142 nt, Rhodoferax sp.
  source 1..142: mol_type = other RNA; note = Related to NZ_SZVI01000009.1
tagactatacgcatgtcagctgactaggagcatctccagtcataaggctgacctctaggccgtctgatctacttgtgtggcgtgctcggtttaccgagcacgccacacaaggcgtagaggctctttctccatcatttatcat

SEQ ID NO: 17539 - RNA, 141 nt, Ideonella sp.
  source 1..141: mol_type = other RNA; note = Related to NZ_BADL01000521.1
taaaatgcgccccatgtcagctgactaggagcatctccagtcgtttaggctgacctctaggccgtctgatctacttgtgtggcgcgcttggtaatgtccaagccgccacacaagacgtagagcgatggtctccttcgcggt

SEQ ID NO: 17540 - RNA, 138 nt, Comamonas sp.
  source 1..138: mol_type = other RNA; note = Related to JACUZW010000001.1
taaaattgaccccatgtcagctgactaggagcatctccagtcatataggctgacctctaggccgtctgatctacttgtgtggtgagcttacgccaagctcgccacacaaggcgtagaagatcaacgtctcagatccga

SEQ ID NO: 17541 - RNA, 139 nt, Ramlibacter monticola
  source 1..139: mol_type = other RNA; note = Related to JAEQNE010000002.1
tacaattcgcacatgccagcgaccaggagtatctccggtcacacgtgctggcctctacggcgtctggatctacttgtgtggtgagccttcgtggctcccacacaagatgtagaagccgccaacatctctgctgtcttcc

SEQ ID NO: 17542 - RNA, 143 nt, Cupriavidus necator
  source 1..143: mol_type = other RNA; note = Related to CP039287.1
tatactagcaaaatgccagccgactaggagtagctccagtcacataggctggcctctaggccgtctgatctacttgtgtggcgtgcccatgtcaatgggccgccacacagggcgtagattcctcctctcttccccccgatttt

SEQ ID NO: 17543 - RNA, 152 nt, Sphaerotilus natans
  source 1..152: mol_type = other RNA; note = Related to CP035708.1
tagcatagcttcatgctggctgactaggagtatctccggtcgcacaggccagcctctaggccgtctgaatctacttgtgtgatgcgcttgacccagggtgagccgggacaggtgctcacacaaggcgtagatcggtacatcagcgcaacaat

SEQ ID NO: 17544 - RNA, 151 nt, unidentified
  source 1..151: mol_type = other RNA; note = Related to NZ_JPOQ01000093.1; note = Proposed Ferrovum myxofaciens
tatagtgaccaaatgctggctgactaggagtatctccggtcgcaaaggccagcctctaggccgtctgattctactgcgtgtgcccccccgtgtacaggacttctgtacacggtgggggcacacgcaggatatagattgcaccatacttcct

SEQ ID NO: 17545 - RNA, 135 nt, Ramlibacter sp.
  source 1..135: mol_type = other RNA; note = Related to JACORU010000006.1
tacaatagcgtcatgccagcgactaggagcatctccggtcataaacgttggcctctgaggcgtctgaatctacttgtgtggagaccacaggtctccacacaaggcgtagagttctagaggcttcgaacgggtgcc

SEQ ID NO: 17546 - RNA, 143 nt, Herbaspirillum sp.
  source 1..143: mol_type = other RNA; note = Related to VSWE01000008.1
tataatcgcggcatgtcagtgactaggagtagctccagtcattctgctgacctctaggccgtctgattctaccaatttggttgcggggcttgaatcatattcaagccccgcaatagtagattcgcaaatcctccttctcctct

SEQ ID NO: 17547 - RNA, 146 nt, Herbaspirillum camelliae
  source 1..146: mol_type = other RNA; note = Related to NZ_KV880769.1
tataatcgcgccatgtcagtgactaggagtagctccagtcattctgctgacctctaggccgtctgattctaccaatttagttgcgtggcttgaaacttctcaagccacgcaatagtagaactccagatattcaggccttaaaaatc

SEQ ID NO: 17548 - RNA, 146 nt, Pusillimonas soli
  source 1..146: mol_type = other RNA; note = Related to NZ_SDQC01000001.1
tataattgagttatgtcagtgactaggagtagctccagtcattttgctgacctctaggccgtctaattctacctaacttggttgcgtggcttgaatttgattcgagccacgcaatagtagatccaacaaacaaaatttcagattgc

SEQ ID NO: 17549 - RNA, 146 nt, Chromobacterium violaceum
  source 1..146: mol_type = other RNA; note = Related to JAGKRE010000004.1
tatactaccatcatgtcagtgactaggagcatctccagtcgttatgctgacctctaggccgtctgattctaccaaattgattgcgtggtctgaaaccgatgttcagaccacgcaatagtagatatcccagatttgccgccaatccc

SEQ ID NO: 17550 - RNA, 153 nt, Undibacterium luofuense
  source 1..153: mol_type = other RNA; note = Related to NZ_JAGSPN010000010.1
taggattaacgtatgtcagtgactaggagtagctccagtcgaaatgctgacctctccgccgtctgattctaccaaatttggttgcgtggcttaaattaattaacatttaagccacgcaatagtagattcccctcccgcagccaagctatatct

SEQ ID NO: 17551 - RNA, 136 nt, Vibrio parahaemolyticus
  source 1..136: mol_type = other RNA; note = Related to NNGJ01000068.1
tattatctagtcatgccggagactaggagtagctccagtcgttaactggcctctacctgagattataaatgttactaatgcacgtacattcgcaagaatgtcgtgcattttgtaattttggcctttggaaagctta

SEQ ID NO: 17552 - RNA, 134 nt, Aliivibrio fischeri
  source 1..134: mol_type = other RNA; note = Related to MAJX01000042.1
tactatttaatcatgccggagactaggagtagctccagtcgctaactggcctctacctgagattataaattttactaatgcacgtacatttatgaaaatgacgtgcattttgtaattttgtcgtacggaaaact

SEQ ID NO: 17553 - RNA, 141 nt, Vibrio jasicida
  source 1..141: mol_type = other RNA; note = Related to NZ_LNQW01000024.1
taacctattagtatgctagagactaggagtagctccagtcgttaactagcctctacctgcgtttaggtatgttacttgtgcacgtttcctttacaaaagggcgtgcattttgtaattctagcctctagaaactcatactgc

SEQ ID NO: 17554 - RNA, 137 nt, Vibrio nigripulchritudo
  source 1..137: mol_type = other RNA; note = Related to CAOA01000134.1
tataatcagggcatgccggagactaggagtagctccagtcactaactggcctctacctgcgtttaggtgtgttactagtgcacgttccttcattggacgtgcattttgtaattttgggggacagaaaactaagatca

SEQ ID NO: 17555 - RNA, 153 nt, Thiocystis violascens
  source 1..153: mol_type = other RNA; note = Related to NC_018012.1
taaactcaaagaatgctagcgactaggagcatctccagtcattcacgctagcctctacccggtgctgatctacttttgagtttgtgcgcccctctgacaatttgcagacggggcgcacaaatcgtagacatgcctctgctgtcggtctagtcg

SEQ ID NO: 17556 - RNA, 151 nt, Janthinobacterium sp.
  source 1..151: mol_type = other RNA; note = Related to NZ_CP014222.1
tagtatcgagtcatgctagggactaggagtatctccagtcactaaacctagcctctagggcgctatatttagttacgtttgtgtgtactagcaatgcttcgttgcagctagtacacgcttttcgtaatattctaaaattctcgatcgtgta

SEQ ID NO: 17557 - RNA, 156 nt, Deefgea sp.
  source 1..156: mol_type = other RNA; note = Related to NZ_CP081150.1
tattattgcactatgccaaggactaggagcatctccagtcgttagtcttggcctctactgcgctatagttagtttacgtcaggtgtgtgttatcaatgatctttcatcactggtaacacacaccagatacgtaaaaactcaatgccacttccccta

SEQ ID NO: 17558 - RNA, 160 nt, Pseudoalteromonas sp.
  source 1..160: mol_type = other RNA; note = Related to JACJDS010000010.1
taaattgtcaacatacctagcgactaggagcatctccagtcattatgcaaggtcactacaagctatgaattatgttacccttacaccttattcctcgtctaagataagattgagtatagggtgtaagattgtaactttacttgtaactatctctagttaa

SEQ ID NO: 17559 - RNA, 149 nt, Catenovulum maritimum
  source 1..149: mol_type = other RNA; note = Related to LAZL01000002.1
tatatttagtggcatacctagcgactaggagcatctccagtcagtatgcaaggtcactacaggctatgagtcatgttacccttacgccaattcgcctatctgtgtattggcgtaagaatgtaacctaccccttccttttcctttcagaa

SEQ ID NO: 17560 - RNA, 142 nt, Pseudoalteromonas sp.
  source 1..142: mol_type = other RNA; note = Related to LKDV01000028.1
tatcattagttcataccatgcgactaggagtatctccagtcattatgcaaggtcactacaggctatgagtcatgttacatccgtgttggtactgatatttcagtccacacggaatagtaacagctaagttttttgaacataa

SEQ ID NO: 17561 - RNA, 146 nt, Pseudoalteromonas sp.
  source 1..146: mol_type = other RNA; note = Related to NZ_QNQN01000070.1
tatcctaaacacataccatgcgactaggagcatctccggtcattttgcaaggtcactacaggctatgagtcatgttacgtccgtgtagatactctttgtgagttctacgcggaatagtaactctttctattactatcatttatcag

SEQ ID NO: 17562 - RNA, 152 nt, Vibrio diazotrophicus
  source 1..152: mol_type = other RNA; note = Related to JAATOR010000004.1
tatctttgatacatacctagcgactaggagcatctccagtcaatatgcaggtccctacaggctataattaatgttacccttacgccgattgctcactagataccagcatttggcgtaagattgtaactctctactatcctcacgtcatccca

SEQ ID NO: 17563 - RNA, 154 nt, Photobacterium alginatilyticum
  source 1..154: mol_type = other RNA; note = Related to NZ_RSEJ01000003.1
tatcttatggttatacctggtgactaggagtatctccagtcattatgctaggtccctacaggctataattaatgttgcccttacgtcatttactgtctaacaagttagtaaatgacgtaagaatgtaacctctatcttacgcttacgctcccac

SEQ ID NO: 17564 - RNA, 163 nt, Shewanella sp.
  source 1..163: mol_type = other RNA; note = Related to JADWMP020000001.1
tagattcgacccatacctcgcgactaggagcatctccagtcattaagcaggtcactacgggtcatgaaccattttactgaatgcactcgtatcttgattaagtgctattacttattcagatacagtgcatgaaagtaagccaattcctcgaactattcagtgt

SEQ ID NO: 17565 - RNA, 155 nt, Idiomarina sp.
  source 1..155: mol_type = other RNA; note = Related to CP027188.1
tatcataatcacatacccagcgactaggagtatctccagtcattatgcagggtccctacaggctatgagtcaatgttaccttgcgttactctttacgctcatttaaaagcataaagtgtagcgcaagctagtaactcgattagccgcgacaaccc

SEQ ID NO: 17566 - RNA, 163 nt, Planctobacterium marinum
  source 1..163: mol_type = other RNA; note = Related to NZ_JAJEWQ010000006.1
tagattataaatataccagcgcgactaggagcatctccagtcacaaaggcgcaggtcactacgggctatgatgaatgttacccttgcaccattgttgatgttaactaccgttattaacacaacatggtgtaagcaagtaacccggccttcagtaaactcccaa

SEQ ID NO: 17567 - RNA, 140 nt, Shewanella ulleungensis
  source 1..140: mol_type = other RNA; note = Related to BMQW01000002.1
tatgatctgtttatacctagcgactaggagtatctccagtcatcacgcaaggtcactacctgctgttattaatgttacgaccacatggcaagtgattgttatgtggtcaagtaacctcactctcagcactctcagcactc

SEQ ID NO: 17568 - RNA, 155 nt, Salinimonas sediminis
  source 1..155: mol_type = other RNA; note = Related to CP031769.1
tatattatatgcataccttcgactaggagcatctccagtcacaaatgaaggtccctacgagctatgagtcatattacaactgcgctacgatgttttgggaatcaaaatattcgtagcgcaagtatgtaatgcaaactgtcgtaagtttacttctc

SEQ ID NO: 17569 - RNA, 148 nt, Vibrio vulnificus
  source 1..148: mol_type = other RNA; note = Related to DACQGG010000011.1
tagaataactacatacctcgcgactaggagcatctccagtcattaagcgaggtccctacaggccatgagtcatgttaccctcatccttagctcactctcatagagttaaggatgagattgtaacccccccccccacccccacacctat

SEQ ID NO: 17570 - RNA, 142 nt, unidentified
  source 1..142: mol_type = other RNA; note = Related to JAAEYZ010000024.1; note = Vibrionaceae bacterium
taatataatgacataccacgcgactaggagcatctccagtcattaggcgaggtcactacaggccatgagtcatgttaccctcaccctgacctcataacgagtaagggtgagattgtaacctatttgcccgtcccccttctcc

SEQ ID NO: 17571 - RNA, 149 nt, Vibrio parahaemolyticus
  source 1..149: mol_type = other RNA; note = Related to JWSV02000003.1
taaaataaacgtataccacgcgactaggagtatctccagtcattaggcgaggtccctacaggccatgagtcatgttaccctcaccttgttctcatttttaatgagtcagggtgagattgtaaccacaccataaaccatgacatatccat

SEQ ID NO: 17572 - RNA, 144 nt, Shewanella algae
  source 1..144: mol_type = other RNA; note = Related to NZ_LVDX01000004.1
taatcttcgaccataccacgcgactaggagtatctccggtcatatagcgaggtcactacaggctgtcatttatgttactcccacatccgagcactaaactcagatgtggggttagtaaccatctctcctcaagcccatctggtt

SEQ ID NO: 17573 - RNA, 139 nt, Vibrio anguillarum
  source 1..139: mol_type = other RNA; note = Related to NZ_CP091185.1
tattatgtacgtaaccttgcgactaggagtatctccagtctttgagctaggtccctacaagccatgataaatgttaccctccgtgcaaaattaacattttgtgcggagattgtaaccaattctctgttcgttctgatct

SEQ ID NO: 17574 - RNA, 142 nt, Vibrio cholerae
  source 1..142: mol_type = other RNA; note = Related to AAXNPA010000001.1
tatcatttactcatacctcacgactagaagcatcttcagtcactatgtgaggtccctacaggccatgagtcatgttaccttcctttcttctctctctagggggaaaggaagaatgtaaccttctaactttacctcttccctc

SEQ ID NO: 17575 - RNA, 127 nt, Raoultella terrigena
  source 1..127: mol_type = other RNA; note = Related to JABXGE010000012.1
tattattaaaaaataccttgcgactaggagcatctccagtcactatgcaaggtccctacaggccatgattcatgttaccctccccctacgggggaggattgtaaccttctgattttcataacactta

SEQ ID NO: 17576 - RNA, 149 nt, Colwellia sp.
  source 1..149: mol_type = other RNA; note = Related to NZ_CP034660.1
taatatttatacataccttgcgactaggagaatctccagtcaaaaatgtaaggtccctagccgttattattaagttacttgaagcgcagacataagattataattcttatactgcgcttttttgtaatccctactatgtatatagtctt

SEQ ID NO: 17577 - RNA, 156 nt, Alteromonas mediterranea
  source 1..156: mol_type = other RNA; note = Related to NZ_CP041170.1
tatactatgtacatacctcgtgactagaagtaacttcagtcaaaaaattcgaggtcactaccggctatgattcagttactcttcactggggtgatttaaatgtttttaagttacctcagtgttaagtagtaaacctcatgaatcaaactaacgttt

SEQ ID NO: 17578 - RNA, 145 nt, Methylomonas sp.
  source 1..145: mol_type = other RNA; note = Related to CP033381.1
tatactcagaaccatgctagtgactaggagtatctccagtcataaatactagcctctacctgcgtttagcctaatttatcttgcccgaactctttcagagacgggcaagttgaaatttgaggaacaatgccttttggtatagttc

SEQ ID NO: 17579 - RNA, 145 nt, Methylovulum psychrotolerans
  source 1..145: mol_type = other RNA; note = Related to NZ_CP022129.1
tacacttaacagtatgctagtgactaggagtatctccagtcataaatactagccgctacctccgtttagcctaatttatcttgcccgaactctttcagagacgggcaagttgaaatttgacgaacattgcgatctggtgtcgttc

SEQ ID NO: 17580 - RNA, 161 nt, unidentified
  source 1..161: mol_type = other RNA; note = Related to MGYX01000019.1; note = Gammaproteobacteria bacterium RIFCSPLOWO2_12_FULL_47_76
tacattatctctatgctagcgactaggagtatctccagtcacatgtctagcctctacgggctataagccataattcatcttgtcctctaccctacgttccatgaattagcatggagtggggtagggcaagttgtatttttaaagtatagagttttactcaa

SEQ ID NO: 17581 - RNA, 148 nt, unidentified
  source 1..148: mol_type = other RNA; note = Related to JACUUH010000036.1; note = Gammaproteobacteria bacterium
tagcattcattacatgtcagcgactaggagtatctccagtcttcgtatactgacctctagtggttttaattcataatttgttttgtctttcccttaaggttctagggaaagacaaaatataatgacagtgactttattcaattgaaaa

SEQ ID NO: 17582 - RNA, 152 nt, Psychromonas sp.
  source 1..152: mol_type = other RNA; note = Related to PJBZ01000069.1
taaaattaaggtcgctgaccgactaggagtatctccagtcatttgagttagcctctaaaagtaattagatatgtttcatcttgtctatcacacaatttttatgatgtgtgatagagcaagttgtaacctcaatatttaattagattagacga

SEQ ID NO: 17583 - RNA, 150 nt, Psychromonas sp.
  source 1..150: mol_type = other RNA; note = Related to NZ_WTKU01000003.1
tataatatatttttgctgaccgactaggagtatctccagtcatctgagttagcctctaaaagtgattagaaatgtttaaccttgcctatccgcaactatataaaaatggccatggataggcaaagttgtaaatataatgttttaattagt

SEQ ID NO: 17584 - RNA, 146 nt, Methyloprofundus sp.
  source 1..146: mol_type = other RNA; note = Related to JACUUF010000373.1
tataataaacccaacccagtgactagaggtatcctcggtctggcttcggcggctggtgagcagtggtttatagtatttataaaaaagccttggcaatttgttttgtcagggcttttttattggtgttataaacccaatcagttagc

SEQ ID NO: 17585 - RNA, 150 nt, Escherichia coli
  source 1..150: mol_type = other RNA; note = Related to CP028745.1
taaagtgtttttatgccaacgactaggagcatctccagtcataaatgttggcctctacaggcctttatatagtgttgctcttgtactgccttctctttcgagagaaggtatgtacaagaagtaaagcctgcgaagggagggtgtctgggg

SEQ ID NO: 17586 - RNA, 150 nt, Enterobacter ludwigii
  source 1..150: mol_type = other RNA; note = Related to NZ_CP006580.1
taaagtagctttatgccaacgactaggagtatctccagtcattaatgttggcctctacaggccttgatttagtgttgctcttgtactgccttctctcccgggggaaggtatgtacaagaagtaaggcctgtaaaagggagggtgtctggg

SEQ ID NO: 17587 - RNA, 155 nt, Pantoea vagans
  source 1..155: mol_type = other RNA; note = Related to NC_014562.1
taaagtatctttatgccaacgactaggagaatctccagtcaaaaatgttggcctctacaagcctttatatagtgttgctcttgtactaccttcttctttgatatttgaagaaggtatgtacaagaagtaagggttttctacagctacagctacag

SEQ ID NO: 17588 - RNA, 149 nt, Yersinia frederiksenii
  source 1..149: mol_type = other RNA; note = Related to NZ_CQDT01000017.1
tacgctaaattcatgctgacgactaggagtatctccagtcaccaatgtcggcctctacaagcctttaggtacgttactcttatgtcatcctcttcagcctgaagaggatgatgtaggtagtaaaaaaatacacaaactgtatgagtgat

SEQ ID NO: 17589 - RNA, 151 nt, Photorhabdus luminescens
  source 1..151: mol_type = other RNA; note = Related to NZ_JXSK01000013.1
tatatttaacccatgctagcgactaggagtatctccagtcagcaatgttagcctctacgagcctttatgtaatgttactcttgtactgcccttcttcataaacctgaaaagggtatgtacaggtagtaaatttcaaagagaacgagccttt

SEQ ID NO: 17590 - RNA, 155 nt, Pseudomonas sp.
  source 1..155: mol_type = other RNA; note = Related to NZ_LR733826.1
taaaatgagggcatgtcagcgactaggagtagctccagtcaacagtctgacctctaggcgcctttatcctttttacgtttgtaccgctcttcttgatgcaaggcataagaagagcggtacaaatagtaaaaaacctcctcggcacctagcagcac

SEQ ID NO: 17591 - RNA, 150 nt, unidentified
  source 1..150: mol_type = other RNA; note = Related to NZ_JAJOYU010000011.1; note = Proposed Pararheinheimera soli
cataataatttcatgcttctgaccttggagcatctccggtcaatcaggaagcctctataggcagtatagtctcgtaaattactaaggctcccgttaagcaattatcgggggccttaataatttacaagacacgtaaaggtgcttcagtca

SEQ ID NO: 17592 - RNA, 151 nt, Serratia liquefaciens
  source 1..151: mol_type = other RNA; note = Related to CP048043.1
cataataaccacatgcttctgaccttggagtatctccggtcaaacaggaagcctctataggcagtatagtctcgtaaattattaaggcccccgttaagcaattatcgggggccttaataattttcagataacgaaaaggcacttcagtcaa

SEQ ID NO: 17593 - RNA, 149 nt, Klebsiella pneumoniae
  source 1..149: mol_type = other RNA; note = Related to FWGN01000003.1
cataatgacattatgcttctgacttggagtatctccggtcaaccaggaagcctctataggcagtatagtcaggtttattactaaggcccccgttaagcaattatcgggggccttagtaatttctgggccccagcaaggccttctgaccc

SEQ ID NO: 17594 - RNA, 148 nt, Escherichia marmotae
  source 1..148: mol_type = other RNA; note = Related to LR134270.1
cataatgagcctatgcttctgacttggagtatctccggtcaaacaggaagcctctataggcagtatagtctcgtaaattattaaggctcccgtgaagtgattcttgggggccttaataatttatggggccgcaggtgcttcagtacat

SEQ ID NO: 17595 - RNA, 151 nt, Cronobacter sakazakii
  source 1..151: mol_type = other RNA; note = Related to NITI01000005.1
cataatcagtacatgcttctgacttggagcatctccagtcaatcaggaagcctctataggcagtataaggtcttgtaaaattattaaggctcccgtaaagttcttgcgggagccttaataatttcatatatccgcaaaagggtttcagcac

SEQ ID NO: 17596 - RNA, 153 nt, Escherichia coli
  source 1..153: mol_type = other RNA; note = Related to NZ_ADJG01000004.1
catcatgtatgtatgcttctggcttggagtatctccagtcaaacagggagcctctacaggcagtatagttatgttaattacaaaggccctgagtgataaaaattactcagggcctttgtaatttctaacatacaaaataacagtggatgctga

SEQ ID NO: 17597 - RNA, 144 nt, Escherichia coli
  source 1..144: mol_type = other RNA; note = Related to ABBXOP010000094.1
gataatgaatccatactcttgactagtgagatatctccagtctaaaagagagtccctaaaggcagtatagttttaaattagaaaaggcggagagaaatctccgccttttctaatttaaaacagggagaggatgttttgaaaata

SEQ ID NO: 17598 - RNA, 145 nt, Proteus mirabilis
  source 1..145: mol_type = other RNA; note = Related to CP021694.1
tataatataaccatactcctgactagcgagttatctccagtcataaagggagtccctaaaggcagtataaatatattagaaagggtgaagagagattcttcaccctttctaatatatagggggaaagaatatgaaattagaggaa

SEQ ID NO: 17599 - RNA, 151 nt, Pectobacterium atrosepticum
  source 1..151: mol_type = other RNA; note = Related to ALIV01000029.1
tattgtattcttatgtcgtctgactagtgggcattccccagtcacaatagacggcctctacaggcaattagttacgttacatgcccatcagcaaaaggtacaaaagcctacttgttgatgggctttgtaattttaatggctttgacattct

SEQ ID NO: 17600 - RNA, 161 nt, Enterobacter hormaechei
  source 1..161: mol_type = other RNA; note = Related to CP029126.1
taagatgatgttatgccgtctgactagtgggcattccccagtcatgatagacggcctctacaggcaattagtaacgttacaacccctcaatatagatggtgtcaataaaacaccggtaattgaggggttttgtaattatatccattaaaaagtttacgtat

SEQ ID NO: 17601 - RNA, 160 nt, Escherichia fergusonii
  source 1..160: mol_type = other RNA; note = Related to NZ_CP042942.1
tataaattgatcatgtcgtctgactagcgagtattctccagtcacagtagacggcctctacaggctattaagtacgttactgcccccttagatcgttcttctctacgaagctactgtttaagggggctttgtatttctaattcactatacctgactgccc

SEQ ID NO: 17602 - RNA, 158 nt, Providencia rettgeri
  source 1..158: mol_type = other RNA; note = Related to CP096258.1
tatactcattgcatgccgtgactagtgagaatctccggtcagcgaacggcctctacaggcattaagatatcttgcaataccgcttcataacttgtaattaattgaaaaattacacacttatgaggcggtttttgtatgtctatccaaccttaccctct

SEQ ID NO: 17603 - RNA, 165 nt, Musicola paradisiaca
  source 1..165: mol_type = other RNA; note = Related to NC_012880.1
tatactaaatccatgccgtgactagtgagaatctccggtcaattgacaacggcctctacaggctttaatgcacttacaatgccgcttcgcttactcgtagttagttgaaaaacctacgatgtaacgaggcggtttttgtatgtatcataccagctacccatacat

SEQ ID NO: 17604 - RNA, 146 nt, Yersinia frederiksenii
  source 1..146: mol_type = other RNA; note = Related to NZ_CPWN01000004.1
taaagtaatttcatgccaacagactaggagtatctccagtcaatagtgttggcctctacaggcaattattcaatgttgcacttgtgtattccccctcaatgggggatacacaagatgtaaagaggtataacttggcaaatctaaac

SEQ ID NO: 17605 - RNA, 145 nt, Photobacterium kishitanii
  source 1..145: mol_type = other RNA; note = Related to PYNG01000071.1
taagattatacacagctagcgactaggagtagctccagtcacaataactagcatttatagattacttataaatttaatttacagttgcatgaagtctttaattaggcttcatgcagtatgtaatcttatccctttcccttccctt

SEQ ID NO: 17606 - RNA, 149 nt, Frischella perrara
  source 1..149: mol_type = other RNA; note = Related to QGLM01000007.1
tattctacgaatatgccagtgactaggggtatctccagtcgataagctggcctctactggtccatcagatacatttactggtgcggtttaatttagtattaaccaagttataccgcatattgtaaatttctatatcaatttaacttatc

SEQ ID NO: 17607 - RNA, 147 nt, Aeromonas sp.
  source 1..147: mol_type = other RNA; note = Related to CP077210.1
taacgtctgcatcactggtgactaggagtaactccagtcgttaagccagtccctaggcgtcattacctgatttctttcttccccccctctttactatgctgagaggggaagggaagattgaaagtataaatacccttcagttttccc

SEQ ID NO: 17608 - RNA, 154 nt, Aeromonas veronii
  source 1..154: mol_type = other RNA; note = Related to JAEHHQ010000003.1
aacgttagctccactggtgactaggagtaactccagtcggtaagccagtccctaggggtcattacctgatttcattcctccctcccctcctgtttttcacattggcagagaggggaagggaagattgaaaataatcgcacatcgcacatcgcac

SEQ ID NO: 17609 - RNA, 160 nt, Aeromonas veronii
  source 1..160: mol_type = other RNA; note = Related to NZ_MVPS01000007.1
gataatttcgaaatactagtgactaggagtatctccggtcaatccaaaggatacgtccaatggataagctagtccctaggggtcattacctggtttcttttatctctcccctcatgaatgagggggggatatttgaaattatctatttatcttgcccctc

SEQ ID NO: 17610 - RNA, 134 nt, Alteromonas sp.
  source 1..134: mol_type = other RNA; note = Related to SIHL01000004.1
tatacttaagttcaccagtgactaggagaagctccagtcacaaagctggtccctaggagtcattataaaatttcactgttacgcccctcttttggggcgttcagatgaaaattgcgacttgttttataaacatc

SEQ ID NO: 17611 - RNA, 135 nt, Paraneptunicella aestuarii
  source 1..135: mol_type = other RNA; note = Related to NZ_CP074570.1
tataatggcggttaccagtgactaggagaagctccggtcggaaagctggtccctaggagccataatttgatttcgctgtccatcccttccaattgaggaagggggatagttgaaaagattgtgttttttctccac

SEQ ID NO: 17612 - RNA, 137 nt, unidentified
  source 1..137: mol_type = other RNA; note = Related to NMRX01000072.1; note = Methylococcaceae bacterium CS5
tataatacaaagaccggtgactaggagtatctccagtcgtaatgctggtcactacttgccttcagctatttcttctggtcactttgtctatgatagacagggtggtcgattgaagaattttctcctccctacctccc

SEQ ID NO: 17613 - RNA, 139 nt, unidentified
  source 1..139: mol_type = other RNA; note = Related to QNFQ01000482.1; note = Gammaproteobacteria bacterium
tataatcaaggctactggtgactaggagtatctccagtcgtaaagctggtccctatcggtctggatttaatttctctgtctgcccttcccaacacggggggcaggtagctgaaaagttctcatattgccaatatatccc

SEQ ID NO: 17614 - RNA, 134 nt, Endozoicomonas numazuensis
  source 1..134: mol_type = other RNA; note = Related to NZ_JOKH01000004.1
tatacttgtttttaccagtgactaggagtagctccagtcgtaaagctggtccctagtggcctacatgtcatttcttctacgaccctcttcagagggtcagtggttgaaaactcttttactagcttttggttttt

SEQ ID NO: 17615 - RNA, 133 nt, Acidithiobacillus ferrivorans
  source 1..133: mol_type = other RNA; note = Related to LT841305.1
tacactagctctaccagtgactaggagtatctccagtcgttgagctggtccctacctgcctttatgcaatttcttcaacctgctccctctgtgggtgcaggtagttgaaaatcccagccgaccagtggaatcg

SEQ ID NO: 17616 - RNA, 140 nt, unidentified
  source 1..140: mol_type = other RNA; note = Related to NVXL01000289.1; note = Alteromonadaceae bacterium
tacaatagacctactggcgactagaggtatcctcagtcacgaagccggtcactagaggtctttagttatttctctggctgctcccccagttttctgggtgagcaggtagttgaaaaagagccctccgcctaccgatctgt

SEQ ID NO: 17617 - RNA, 150 nt, Pseudoalteromonas aliena
  source 1..150: mol_type = other RNA; note = Related to NZ_CP019628.1
tataatggaatgactggcgactcggagtatctccagtcaacatgctggtccctaaatgcctataggtatgtttcttctgttgcctttgtcaacgattcggttcggcaaaggcaactagttgaaataagtctctagagtctttcgccttgc

SEQ ID NO: 17618 - RNA, 130 nt, Sulfuricurvum sp.
  source 1..130: mol_type = other RNA; note = Related to JAFLKV010000025.1
tataattgcttttatgattgagtgacttgaagtatcttcagtctaaatgcttaatcctctaaggtgctttatttactaatgcaagggcattatttgccctttgtaaaaggtgctcagtgactcaaacctc

SEQ ID NO: 17619 - RNA, 129 nt, Sulfurovum sp.
  source 1..129: mol_type = other RNA; note = Related to JAJPEU010000001.1
tatacttataccatgattaagtgactagaggtatcctcggtcatattagcttaatcctctaaagtgcaatattactgtgactaagccctttaaagggcttatgtaaaggtaaaaatttgaataaaactt

SEQ ID NO: 17620 - RNA, 142 nt, unidentified
  source 1..142: mol_type = other RNA; note = Related to FXLF01000023.1; note = Candidatus Thioglobus sp.
taaaataactttaggctaaatgactagaagcaccttcagtcatataaactatttagcctctaagcggttattactaattttaaatgcctaattttgattcatcgaaattgggcattttaaaaaataccagccaatcaaatga

SEQ ID NO: 17621 - RNA, 156 nt, unidentified
  source 1..156: mol_type = other RNA; note = Related to JACCHT010000001.1; note = Candidatus Thiodubiliella endoseptemdiera
tataatataaccacgctaaatgactagaagtatcttcagtctaattcactccaaaggagaatttagcctctaagcggttattattaattttaaaatgcctggttttgattctatcaaaactgggcattttaaaaaatgccaactaatttataatgc

SEQ ID NO: 17622 - RNA, 149 nt, unidentified
  source 1..149: mol_type = other RNA; note = Related to VCHC01000138.1; note = Gammaproteobacteria bacterium
cactcacgctaaatgactagatgcatcatcagtcaatttaaaatttagcctctaagcggttatcattcatttttcacatcctcaatactttgattattttcaatcaaagcactggatgtgaaaaaacgctacctaatttatgacaaaaa

SEQ ID NO: 17623 - RNA, 213 nt, Clostridium sp.
  source 1..213: mol_type = other RNA; note = Related to NZ_AP024849.1
tggagtttatccaaccttagcagttaaggtagttgaaagcacaaaatattgtaaaattattatcggctaccgccgataatatgagagtgaaaatttactattttgcgcagcaagaacagctggttctagctacaaaaatagtaaattttcggtgagttacaaagaataattttagtaggattcctcccaatagtaggtgaaatatgaagtatt

SEQ ID NO: 17624 - RNA, 213 nt, Clostridium tyrobutyricum
  source 1..213: mol_type = other RNA; note = Related to JAHHUY010000039.1
ggcattcagccaaccttagaagttaaggtagttgtaaatacaaaattgtaaaattattatcggactaccgccgatatatatgagagtgaaaatttcatattttattaagatagaacaaactggttctatctacaaaaatatgaaattttacgatgatttactaataataattttagtaggattcctcttaaaggtgatgaataattatgcaat

SEQ ID NO: 17625 - RNA, 216 nt, Clostridium botulinum
  source 1..216: mol_type = other RNA; note = Related to SWQT01000003.1
ggcacagaaatatgccaccttagctgttaaggtaatagaaagcacaaaatagaaaaattattatcggactaccgccgatgggatgagagtgaaaatttaatattttacgtagttataacatgctggttataacaacaaaaatataaaattttctatgatttatcaaggaataattttagtaggattcctcattaataggtaggtgtaatatgaaat

SEQ ID NO: 17626 - RNA, 206 nt, Clostridium perfringens
  source 1..206: mol_type = other RNA; note = Related to UFXA01000002.1
tatacaaccttagcagttaaggtataagtagatacaattttcgtaaaattattatcggctaccaccgataggatgagagtgaaaattaaatattttaaatagctatcacaagctagttctagctataaaagatttaattttctagtgatttataaagaataattttagtaagattcctctaattataggtaggtgcaatatgaaat

SEQ ID NO: 17627 - RNA, 196 nt, Anaerotignum propionicum
  source 1..196: mol_type = other RNA; note = Related to CP014223.1
ggctctatgccacctcagcattctgaggttaatgaaatcacaatcttgaaaaatttgaatttgatgcctcaaatatttgagaatttaatttatcggccagaacgacttgttctggaccttacaaaatcaaattcttttgtgactaactttaacaaatttttgtgggacactttttatggaggatgtataatggaat

SEQ ID NO: 17628 - RNA, 218 nt, Paeniclostridium sordellii
  source 1..218: mol_type = other RNA; note = Related to JAASHB010000001.1
gacattttgtcgccttagcactctaaggataatgaaattacaattttgtaaaatttgaattgactctgtcaatatttttgaaagttaaattattaaaaatttatgttacaatcatctagaattgataacagaaatttttaataattaattgatctatttattataacttaatcaaattttagtagggtttcttttttatggaggaaataaattgaaat

SEQ ID NO: 17629 - RNA, 210 nt, Clostridioides difficile
  source 1..210: mol_type = other RNA; note = Related to AAXVUS010000010.1
gacacattgtcaccttagcattctaaggttagtgaaactacaaaattgtaaaatttgaattgactcagtcaatatttttgaaagttgattctttaaaattagcaaactcaactagctagattgagattcgccaattttaaagaatctaaaagcttaattttatcaaattttagtggggtttctttttttgggaggaaatatgattaaata

SEQ ID NO: 17630 - RNA, 209 nt, Cellulosilyticum sp.
  source 1..209: mol_type = other RNA; note = Related to NZ_FMMP01000006.1
gactatatgtcaccttaacattttaaggtaatagtaataacaaaagaatgctcaatttgtatttgctacgcgcataattttgacgataaattatttcaatttcttcactcttgtacttacaaggagcaaagaaatcaaaacaatttacaaaacaaatatttcaaatttcagtagggttcctttttcttaggaggataaatgaatataca

SEQ ID NO: 17631 - RNA, 219 nt, Blautia sp.
  source 1..219: mol_type = other RNA; note = Related to NZ_JACOOV010000022.1
gacttatttgtcaccttagcttttaaggttaatataattacaaaatagtaaaatttgaattgattccatcaatgattttgagtggataagaaaaattttaaattgctcactatctgggttcaaattgaaaatttttcttattagatcaatttgtcaaataaaatatatcaaattttagtaggatttcccttgattttatgagggaaaaatgtataggtt

SEQ ID NO: 17632 - RNA, 226 nt, Crassaminicella thermophila
  source 1..226: mol_type = other RNA; note = Related to CP042243.1
ggctatttgccaccttagcttttaaggttaaagcaatgacaatttgttaaatttgaattgactccgtcaatatttttgatgatgtaattaaatttattgcacaaccgttttggctcactgactcagctcgccaaaagaacgcacaataaatttaattacatgtcaataaatttaatcaaatttaagtagggtttctttttttagttgggaagtgataaattggata

SEQ ID NO: 17633 - RNA, 227 nt, Ruminococcus sp.
  source 1..227: mol_type = other RNA; note = Related to NZ_QUEQ01000010.1
agcctttggcttcctcagcgtttgaggataaagtagttaaaatttggttaaatttgttcgactacgtcgatgttttgagacaagtcaatttattctaagaacctatcaacgtcggcaaacttgccgccattgatagaacctcagaataaatcaacttgtatacaaataattgttaccaaatttaagtaggatcctttttttgtggagaaaagatgaaacaatacatt

SEQ ID NO: 17634 - RNA, 226 nt, Roseburia sp.
  source 1..226: mol_type = other RNA; note = Related to FMEB01000016.1
agctttttgctccctcagcgtttgaggataaggtaattaaaatttggttaaatttgttcgactgcgtcgatgttttgtgacaagtcaatttattctgagaacctacgaatgtcggcaagcttgccgccattagtagaaccccagaataaatcaacttggttacaaagaactgttaccaaatttaagtaggatccttttttgtggagaaaaaatgaaacgatatatt

SEQ ID NO: 17635 - RNA, 227 nt, Roseburia sp.
  source 1..227: mol_type = other RNA; note = Related to JAGZZD010000009.1
ggctttttgccacctcagcgtttgaggttaaagcaatataaatttggttaaatttggtcgacgatgtcgatgtttggtttaaaagtaaatttattatatgaaccttcttatttcggcaaccttgcctcaataagaagaaccccataataaattttctttttgcaaagaattatttccaaatttaagtaggatcctttttttatggagaaaaaatgaaacgatacata

SEQ ID NO: 17636 - RNA, 251 nt, Agathobacter sp.
  source 1..251: mol_type = other RNA; note = Related to JAFQBJ010000029.1
ggcttttgtgccgcctcagcgtatgaggttaaagcaatgagatttggttaaatttggcttgacagacgtcaaatctttggagtaaaagatttgaatttgctgagaacccacgtctacagccacgcttggctgttgacgtagaacctcaccaaattcaaacttttaggcaataaattcttaccaaatttaagtagggtccttttttgttacatttttttaagaaaagagtacggaagatgaaaaaatatatt

SEQ ID NO: 17637 - RNA, 225 nt, Roseburia sp.
  source 1..225: mol_type = other RNA; note = Related to NZ_MJHW01000008.1
ggcataaatgccaccttaacattttaaggtagatgtatttagaaattagttaaatttgtatgactaccgtcatatttcagatttcaatttcattggttgttcacaaccatgaccttcgctactacgctcaggtcagaacgcaaacaaccaatgaaattgactcagaaaaaatttaacaaatttaagtaggattcctttttttatggagaaaactatgtataaatt

SEQ ID NO: 17638 - RNA, 226 nt, Intestinimonas butyriciproducens
  source 1..226: mol_type = other RNA; note = Related to NZ_JADMQW010000015.1
ggcatactgccgccttagctattaaggttgatgtaactacattctgttgaatttggaatggcttccagccatgctgtgtagccagaaagaaagtaaaatcagaacctcggccctcgcgaacttcgctcacgccgagaacccgctttcactttcttcctgttcaaagaattgtaccaaattcaagtggagttctttatttataacagacgggggtatagcatgctta

SEQ ID NO: 17639 - RNA, 227 nt, unidentified
  source 1..227: mol_type = other RNA; note = Related to RKGG01000020.1; note = Clostridiales bacterium
ggttaataaccgccttagcttttaaggttaatgtaactacaaaatgttgaatttaaaatgaccttcggtcatatttatattcaaacaaaaacatatcatcaacaacctgacattcgcgaacttcgctcatgttcagaacgccgctgatatgttttcatttgttcaaagaatttataataaattcaagtggagtcctccactgttttcaatggtggtgaatataagtt

SEQ ID NO: 17640 - RNA, 222 nt, Ruminococcus sp.
  source 1..222: mol_type = other RNA; note = Related to DNFS01000014.1
ggcattactgccaccttagctattaaggttaatgtaactacatttcgttgaatttggatgacatcctgtcatctttagttaaggaagaaaatagcatcaccaaccgcttggtcgcgggactccgctcccggcgagaacgctgatactattttccaccttttcaatgaattgtaccaaattcaagtggggttctttttatttggggttaaatagttatgatat

SEQ ID NO: 17641 - RNA, 226 nt, unidentified
  source 1..226: mol_type = other RNA; note = Related to JAGAMN010000013.1; note = Oscillospiraceae bacterium
ggcgttatgccgccttagcagttaaggttgacgtatcataaatgagttgaatttggatggctgtccagccatgctgtattataagcaataaaacagcatcaacaaccatcgggctccgcggctccgctccgcccgagaacgccgctgctgttttattccttttcaataaattctaacaaattcaagtggagtcctttttctacgatcaggagggtgacgttgtgta

SEQ ID NO: 17642 - RNA, 223 nt, unidentified
  source 1..223: mol_type = other RNA; note = Related to FMXS01000006.1; note = Ruminococcaceae bacterium FB2012
ggtattttatgccgccttagcttttaaggttaacgcatctacaatttgttgaatttggatgacgtcccgtcatattttgatgggacagaaaagaaaagagaaaacctcaccgctcgcgagctacgctcacggtgagaactcctcttttctttcagtcctgcaatgaattgtaccaaattcaagtggagttctttttattttgaggtggaatatccaatgagaa

SEQ ID NO: 17643 - RNA, 225 nt, Clostridium botulinum
  source 1..225: mol_type = other RNA; note = Related to QPZU01000011.1
ggtgtaaagccacctcagcatttgaggttaagaatttacaatttgttaaattttgaatgactccagtcatttttctgatagatttgaattattataggcacaaccttttataagctaagcttagctcataaaagaacgcaccaataataatacaaatctacaataaattgtatcaaaatctaagtaggattctttttttattttggaggataatatgcaagaata

SEQ ID NO: 17644 - RNA, 254 nt, Bacillus cereus
  source 1..254: mol_type = other RNA; note = Related to LJIT01000071.1
ggctcaagtgccaccttagctgataaggtagttgtatctacaattagttgtgttaagacaactaatcgttaagtttttattgactgccgtcaataactttgtttacaatgctaagtatttattataaccatgtaaattcgctacttcgctcattcacagaacataataaatacttagattgttacaaacaattaattaaaaatttaagtaggattccctcctatttttttaatgtaggtgatattggatgaaaa

SEQ ID NO: 17645 - RNA, 242 nt, Bacillus toyonensis
  source 1..242: mol_type = other RNA; note = Related to NVJL01000019.1
agcgtaaatgctgccttagctgttaaggttgttttaattacaatttgctccattgttaaattttccattgactaccgtcaattgtttggagctacaattctaattatttattataaccgtgcgaattcgctactacgctcattcacagaacataataaaaaattagattgtatcaaataatttttcgaaaatttaagtaagattccctttttatttctaaaataggtggtatgtgatgaata

SEQ ID NO: 17646 - RNA, 235 nt, Priestia aryabhattai
  source 1..235: mol_type = other RNA; note = Related to NZ_JAIVKS010000001.1
agcgtatttgctgccttagctgttaaggttgttgtagttacaataaagatcggttaaatttttattgactgccgtcaatatttttgttggcaatatatttatttattataaccgtgtggattcgctacttcgcttatccacagaacataataaagaaatatatcgcttcaaacaattatttgaaaatttaagtaggattccctttatttttgaaataggtgatgttatatgaaag

SEQ ID NO: 17647 - RNA, 229 nt, Cytobacillus oceanisediminis
  source 1..229: mol_type = other RNA; note = Related to NZ_VEEP01000002.1
agcttaggctgccttagctgctaaggttagtgtaatttaatttagttaaatttttattgactaccgtcaattcttttggtctgcaaacatatttctttattataaccatgggaattcgcaactcagctcattcccagaacataataaagaaatattttgctccaaataaatatttaaaaatttaagtaggattccttttcttttttaaaaaaggtgataatgatgaaaa

SEQ ID NO: 17648 - RNA, 234 nt, Bacillus sp.
  source 1..234: mol_type = other RNA; note = Related to LR134328.1
aacttttttaaagttgccttagcgtctaaggttacagcaataacaaaatgttaaatttccattgactatcgtcaatattgtgtagttttttattttaattctttacaaccgtgtgactacgcaaatctttgctccgtcacagaacgtaaataattaaaataaaaagtcaatgaattttttaggaaatttaagtagggctcctcctaatgattaaaggagagataaaagagtggg

SEQ ID NO: 17649 - RNA, 225 nt, Bacillus wiedmannii
  source 1..225: mol_type = other RNA; note = Related to NUQK01000037.1
agcttttagctaccttagcgtttaaggttaatgcattgagaaaatgttaaattttcaagacttgcgtcttaattgtgagaaatgcattttcattttccataaccatgagcctacgcaaatctttgctccggctcagaacatgaaaaaggaaaaagcatatgcaataaatttattggaaaatttaagtagggctctttttatcgttggaggttaaagacttgaata

SEQ ID NO: 17650 - RNA, 233 nt, Bacillus thuringiensis
  source 1..233: mol_type = other RNA; note = Related to NUNG01000033.1
tacctttttaggtaaccttaaaggttaaggttaaagtagctagattaggaaaaaaatgatgaacgacgccgttcattgttttcgaggatactttcgattattccggcctcccttgcagaagcaatctttgcttccactgcggtcaaccgaactaatcgaaagtatgtccaataaaatcattttcatttttttgtagggcttttttttcatttggaggtattatataatgagtt

SEQ ID NO: 17651 - RNA, 232 nt, Bacillus cereus
  source 1..232: mol_type = other RNA; note = Related to NZ_CP085511.1
tacctttttaggtaaccttaaaggttaaggttaaagtagttagattaggaaaaaaatgatgaacgacgccgttcattgttttcgatgatgctgtcgattattccggcctcccttgcagaagcaatctttgcttccacttcggtcaaccgaaataatcgaaagcatgtccaataaaatcattttcatttttttgtagggctttttttcaattggaggtattatataatgagtt

SEQ ID NO: 17652 - RNA, 228 nt, Cohnella faecalis
  source 1..228: mol_type = other RNA; note = Related to QXJM01000039.1
taccgttaaggtaaccttaaagtttaaggtaaatgtatctagaattgaaaaaaatgaggagctcgcgctcactgttttcgaggatactatcaattagtccggtctccattgcagaagcaatctttgcttccgctgcagtcaaccggcctaatcgacagtattgtcaataaaatcattctcattttttgtagggcttttttttatccttggaggtatctataatgagtt

SEQ ID NO: 17653 - RNA, 227 nt, Bacillus subtilis
  source 1..227: mol_type = other RNA; note = Related to NZ_AEHM01000023.1
taccgttatggtaaccttaaagtttaaggttaaagtatttagatttaagaaaaaatgaggaacgaggccgttcattgttttctgggatacttccgattattccgtccggcctagcagaagcaaactttgcttccgcgtcgtccagccgaactaatcaaaagtattttcaaataaatcattatcattttttgtagggcttttcctattggaggattacatgaagtttt

SEQ ID NO: 17654 - RNA, 232 nt, Fictibacillus nanhaiensis
  source 1..232: mol_type = other RNA; note = Related to JAFHKR010000035.1
catgtacacagttaccttagcgtctaaggttgagacaatcacaaaatgtaaaaatattcagaacttgcgttcattgttttacaagaatgcaattaattttataacaaccgctcgcttacgcaatctttgctccagctcggaacgctataaaattaataacatttacaatgaaattcatgaatatttttagtagggctctttttatttattttgggggtaaatttattgtatg

SEQ ID NO: 17655 - RNA, 229 nt, Bacillus cereus
  source 1..229: mol_type = other RNA; note = Related to FMJM01000007.1
aacagttaccttagcggttaaggttttgataactacaaaatgaaaaaatgttctgaacttgcgttcaatgttttacaagaatgcttttaatttttataacaaccgctcgcttccgcaatctttgctccagctcggaacgttataaaaattaaagagcatttacaataaaattcatgaacatttttagtaggactctttttattttttgggggttatgttgcaatggata

SEQ ID NO: 17656 - RNA, 232 nt, Thalassospira sp.
  source 1..232: mol_type = other RNA; note = Related to JAJJZD010000002.1
atcttttggtgatgccttatagtataaggttggattcctaagaattaggaaaaaatgaggaacgtgggagttcagtagtttgagcgcaccgcgtttataaataagtgtcgctcgaattcgcaatctttgctcattcgttcgcttacacttatttataatcttgtgaacaataaaattttactcattttttgtagagctttatttactataattaaggagattcaaatggata

SEQ ID NO: 17657 - RNA, 238 nt, Lysinibacillus fusiformis
  source 1..238: mol_type = other RNA; note = Related to NZ_VEEI01000002.1
tttaagaccttagctgttaaggttaatacatctagaaaatgtaatattgttcggcacgttacgtgcctgatttgcttggtaaacttttaatttttaaagaaccgcacgttttcgcaagctatgctcaaacgaggaacctttaaaaactaaaagtactccaataaaattcaagaacaatattacaaaatatttattttgtagggctcttcttatctgtggaggagaattatgattaata

SEQ ID NO: 17658 - RNA, 263 nt, Streptococcus salivarius
  source 1..263: mol_type = other RNA; note = Related to FR873482.1
aacatatcatgttatttcctttggtagttccaaaggttgagtattttaaaaatagtaaaatttgatactcgactttgtcgaggatagtaataaattactatataaaatagaattacgaaaggtagtacgtagaacctttagacatacggcgaactcgccgcaagtcgtcaagaacccacgtactacctttcgttctcaatgaaagtctctacaaattttaggtagggctctttttatatggagcaatgatgagtaaatatata

SEQ ID NO: 17659 - RNA, 241 nt, Streptococcus sp.
  source 1..241: mol_type = other RNA; note = Related to NZ_VMMH01000009.1
aacatatcttgttatttcctttggtagttccaaaggttgagtattttaaaaatagtaaaatttgttactcgactttgtcgagaatagatagttcaattacgaaacgtcgcacctagaacctctagactcacggcgaactcgccgtaagtcgtcgagaacctacgttctccatttcgtaacaagtaaagcttctacaaattttagtagggctctttttatgtggagtgtttatggaaaagta

SEQ ID NO: 17660 - RNA, 174 nt, Paracholeplasma sp.
  source 1..174: mol_type = other RNA; note = Related to NC_022549.1
gagccctagtaattagatgctggaatcggcaccttggtttgtgtagatcaaactttgcgaattacgttagtaacacggcgtgcgaactattaaaactgtcattcttaaaactgcagacagtttcaagaatgccaatttcaacatttcgcactaactttttaagtagggctctcc

SEQ ID NO: 17661 - RNA, 165 nt, Collinsella sp.
  source 1..165: mol_type = other RNA; note = Related to VOWY01000007.1
taaggtcgcagcgatatctattaccgtcatattgaggtgtccgccgttaaggatggactagagatatcatttaccctttcgtgcttggacgatttccgttctctcgtccttcaccggggggttcaggacgagagaacggaaatcgcccaaacagtgcggccttat

SEQ ID NO: 17662 - RNA, 165 nt, Collinsella sp.
  source 1..165: mol_type = other RNA; note = Related to QSBV01000001.1
caaggccgcagctagtcattgattgccccgattggagcgagtcctctgttaaagatggactgagacgtttttaccaattttggtccgtgcatatggtcattccatagccacggacccgaatccgtgtctacggaatgaccatatgcacggactgtgcggccttgt

SEQ ID NO: 17663 - RNA, 157 nt, unidentified
  source 1..157: mol_type = other RNA; note = Related to JABLXJ010000013.1; note = Firmicutes bacterium
gagggcactagttttagggtcattttgcatagggcgtggccgtgtgccgggcgttaagccaggccgttgaattgatagacttgtggccgcgcggaagtccctcgtctaccctctcgggtagccaaggtccttccgcgcggctcttgtagtgccctcg

SEQ ID NO: 17664 - RNA, 158 nt, unidentified
  source 1..158: mol_type = other RNA; note = Related to SVEQ01000005.1; note = Lachnospiraceae bacterium
agggattctagttttaatataagagttttgctctttttctctgagttgagttcagagaaagttttattgttggtattcgggcgagatttatcactcgcaagaataccagtattcttgcaagcaataaatctcgcttgcgctttaatgtagaatccctt

SEQ ID NO: 17665 - RNA, 162 nt, Coprococcus catus
  source 1..162: mol_type = other RNA; note = Related to QVFD01000002.1
agagattctagtattaatctaaaggcctatggcctttggttctctgagttgagttcagagaatgaaagattgctgacattcgtggcgagttaaaggactcgaaccgatgccagcattggttcgagtcctttaactcgcttccggtttaatgtagagtctctt

SEQ ID NO: 17666 - RNA, 165 nt, unidentified
  source 1..165: mol_type = other RNA; note = Related to JAFTQC010000025.1; note = Clostridia bacterium
agagattctagttttaatctataaagcaatttgcgtttatagtccttagagttgagttcagaggatggaaaattgtaagtcaatcgtgcaaagtttaatcaaatatggctcgcacacgacccatatccgcttaaactttgcctgcggcttaatgtagaatctctc

SEQ ID NO: 17667 - RNA, 175 nt, Clostridium sp.
  source 1..175: mol_type = other RNA; note = Related to JACSRA010000017.1
gagaattctagatttaatcgataatatagtagtattatctatatattatcttctctgagtagatgtgcagagaaagttttgtttttgtccattcttgtaataaaattacaagagatttattccagaataaatcacttgaaatcttattacaatgaggattaatgtagagttctct

SEQ ID NO: 17668 - RNA, 153 nt, Halobacillus halophilus
  source 1..153: mol_type = other RNA; note = Related to NZ_CP022106.1
agggtttctggggatttatgtcacttatactaacatatttgccttgtgtaagcagggttggcagaattgtgtggcttggcttgcatatagtttcactcgcagctcttgctcagagctactcgtaaaactatatgcagcatagcagaaaccctt

SEQ ID NO: 17669 - RNA, 155 nt, unidentified
  source 1..155: mol_type = other RNA; note = Related to JAFRUO010000020.1; note = Clostridia bacterium
agaatacttagtgaaaatatatcacagtaatgtgttatagtgccttatgtaaaatagggtcggtttctttggggctcttacaagcagttgctacacaacgcttgtaatcctcattacaagcgttgcgtaccaactgcttttatgtaagtattctt

SEQ ID NO: 17670 - RNA, 141 nt, unidentified
  source 1..141: mol_type = other RNA; note = Related to JAGBXM010000051.1; note = Clostridia bacterium
ttttatatatcacttttttatgtgttatagtgccttatgttaaatagggtcagttattttggggcgattacaagctgttgctattaacggcttgtaatctcttacatgccgttaatatcagcagcttttgtaagtgttctc

SEQ ID NO: 17671 - RNA, 155 nt, unidentified
  source 1..155: mol_type = other RNA; note = Related to JAGAZX010000174.1; note = Oscillospiraceae bacterium
agaatgcttagaaattttatatcacagaaatgtgttatagtgccttatgttaattagggtctgttactttggggctcttacaagcagttgctgcgccacgcttgtaatccccattacaagcgcagcgcatcaactgcttcatggtaagtgttctc

SEQ ID NO: 17672 - RNA, 155 nt, unidentified
  source 1..155: mol_type = other RNA; note = Related to JAFRDB010000067.1; note = Clostridia bacterium
aaagtacttagtaagatatatcacaaaatgtgtatatagtgccttgtgttaaatagggtcagatgaattggggcgattacaagccgttgctacaaactgcttgtaatcctcattacaagcagtttgcatcaacggcttagtgtgtaagtacttta

SEQ ID NO: 17673 - RNA, 155 nt, unidentified
  source 1..155: mol_type = other RNA; note = Related to JAFTXX010000014.1; note = Clostridia bacterium
agaatgcttagtatttttatatcacagaaatgtggtcataagtgccttatgttaaatagggtcggatcttttggggctcttacaagcagttgctgcgcacgcttgtaatcctcattacaagcgcacgcatcaactgcttagcggtaagtgttctc

SEQ ID NO: 17674 - RNA, 156 nt, Clostridium sp.
  source 1..156: mol_type = other RNA; note = Related to FMGM01000006.1
gaaatacttagtaaattatatggcttagaaagtcgtattgtgctttgtgttaaacagagccagaagaattgtgaggattacaagcagttgctgcgtcacgcttgtaatttctcattacaagcgcgccgcagcaactgcttagttgtaagtatttcc

SEQ ID NO: 17675 - RNA, 156 nt, Butyricicoccus sp.
  source 1..156: mol_type = other RNA; note = Related to QUIJ01000008.1
ggaatgcttagtaaaaagaatatggcgtttttgtcgtattgtgccttgtgttaaatagggccagttagattgtcaggattacaagcagttgctgtggcacgcttgtaatcctcattaaaagcgtaccacagcaactgcttatctgtaagtattcca

SEQ ID NO: 17676 - RNA, 156 nt, Bifidobacterium aemilianum
  source 1..156: mol_type = other RNA; note = Related to NZ_PDCG01000001.1
tgagcacctagttttttgggtaattggttcgtgaattcaattacctctatgcgtaagcatggacgaaagattgctggtcctttgagtgatgtttgtcctcaacggaacgagcggtcgactccggtgatgacaaacatcactcaagtaggtgctcac

SEQ ID NO: 17677 - RNA, 185 nt, Aeromonas veronii
  source 1..185: mol_type = other RNA; note = Related to NZ_JAACNB010000003.1
catgatattcttaaaaagatctctacatcgatagcttagaggaaccctgcttgcaaggttgatattatcatatcctagcctcctcatcggctaatctgtggcgtctcggcgcgtggcacttttagtgcacgacaagttcgtgaaaagatgaattagtatcaatataggatcaagatgaaaaagta

SEQ ID NO: 17678 - RNA, 185 nt, Aeromonas dhakensis
  source 1..185: mol_type = other RNA; note = Related to JADPIC010000001.1
tatgatattcttaaaaagatctctacatcgatagcttagagggaccttgcttgcaaggtcgatatcattatatcctagcctccacatcggctaatctgtggcgtctcggcgcgttgcacttttattgcacgacaagttcgtgaaaagatgaattagtatcaatatgggatcaagatgaaaaagta

SEQ ID NO: 17679 - RNA, 186 nt, Aeromonas hydrophila
  source 1..186: mol_type = other RNA; note = Related to NZ_AP023398.1
catgatatccttaagaagatttctatatcgatagcttagaggggtcttgttcgcaagattgatattactatatcctagcctcaacattagctaacttgtggcgcatccgccatgatgcacttttagtgcacgacaagttcgtgaaaagatgaattagtatcaatataggatcagaatgaaaagcta

SEQ ID NO: 17680 - RNA, 187 nt, Vibrio sp.
  source 1..187: mol_type = other RNA; note = Related to SZQJ01000005.1
agtgatatacttaggaagatttcttcatcgatagtatagagaggctttgttcgcaaagcagatgctttatgtatcccagtctcaacattgtctaatcccgcgcatccaggttgtgatgtacttttactgcacgacaagttcgtgaaaagatgaattagtatctatgtggaatctgtatgaaaaatta

SEQ ID NO: 17681 - RNA, 186 nt, Salinivibrio sp.
  source 1..186: mol_type = other RNA; note = Related to MUEZ01000005.1
gatgatatactggaaaagatttcagaatcgatagtttagagagtgtttgttcgcaaattcgatatttttatatcctagtctcaatattgtctaaatggtgtgcacctttcaaatgtgtacttttaatacacgacaagttcgtgaaaagatgaattagtatctatatggaatcaaaatgaaaagtta

SEQ ID NO: 17682 - RNA, 186 nt, Vibrio sp.
  source 1..186: mol_type = other RNA; note = Related to NZ_LAUM01000014.1
gatgatatacttaagaagatttcagtatcgatagtttagagagtttttgctcgcaaattcgatatttttatatcctagtctcaacattgtctgactctgtgcatccctgtgtaggtgtacttttaatgcacgacaagttcgtgaaaagatgaattagtatccatgtggaatcataatgaaaaatta

SEQ ID NO: 17683 - RNA, 186 nt, Photobacterium angustum
  source 1..186: mol_type = other RNA; note = Related to MSCJ01000001.1
catgatatacttaagacgatttcagattcgatagattagagaagcagtgcttgcaatgctgatatctttatatcctagtctcaacattgtcttaatctgtgcatccctcgcagatgtacttttaatgcacgacaagttcgtgaaaagatgaattagtatcaattatggaatcaaaatgaaaaatta

SEQ ID NO: 17684 - RNA, 186 nt, Vibrio vulnificus
  source 1..186: mol_type = other RNA; note = Related to ABBKDM010000016.1
tatagtacaatcaaggaggtatcttcttcgatagactaatggggttccgttcgcgggatgaagcctggagcttcctagcctagtatgtgctagttctgtgcaactgtgctactagttgtacttttgaggcacgtaaacgtgaaaagacgttctttgtatccaagaagagattactatgaaaaaata

SEQ ID NO: 17685 - RNA, 186 nt, Vibrio cyclitrophicus
  source 1..186: mol_type = other RNA; note = Related to AIDA02000097.1
tatagtacaatagaagagatttcatcttcgatagaataatggatctcgcttgcgagatggagcctggagctccctagcctaatatgtgcttgttctgtgcatccgtatcactagtggtacttttaaggcacgtaaacgtgaaaagacgttctttgtatcgtaagaagagattgttatgaaaaagta

SEQ ID NO: 17686 - RNA, 185 nt, Vibrio alginolyticus
  source 1..185: mol_type = other RNA; note = Related to CP071059.1
tatagtacaatagaagaagtttcttcttcgatagactaatgggtctcgcttgcgagatgaagcctggagcttcctagcctaatatgtgcttgtcctgcgcatccgtatcgctaatggtacttttaaggcacgtaaacgtgaaaagacgttctttgtatccaagaagagattattatgaaaaaata

SEQ ID NO: 17687 - RNA, 193 nt, Pseudomonas sp.
  source 1..193: mol_type = other RNA; note = Related to NZ_JABUYN010000001.1
tacagtataatatcagaaatttcttcttcgatagattaagggaatttgctgatagtttatagtaaatgaagcctagtgcttcctagtcccattatgtgctagtagtccatccgtattcctggagctacttttaatgcacgtaaacgtgaaaagacgttcttggtatcttagaagagattgcaatgaaaaaaat

SEQ ID NO: 17688 - RNA, 186 nt, Pseudoalteromonas sp.
  source 1..186: mol_type = other RNA; note = Related to NZ_CP012737.1
tcccgtatcattgaagatgtttcttcttcgatagattaggggattctacatttagaataaagcctagtgctttctagctcctttatttacttgcttggcgccttgtatctcctgttgccgcttttaaagcacgtaaacgtgaaaagatgttctttgtgtcatggaagaaatagaaatgaaaaagat

SEQ ID NO: 17689 - RNA, 183 nt, Shewanella putrefaciens
  source 1..183: mol_type = other RNA; note = Related to NZ_CP046329.1
tttggtatcataacaacgatttcttcatcgatagagtaaagggttttgcttgcagaacggagccttgagcttcctagcctatcatttacttgttgctgctacagttcgtatcgcacttttaagtacacgtaaacgtgaaaagatgttctttgtatcgtgaaaggaatcattaatgaaaaaata

SEQ ID NO: 17690 - RNA, 189 nt, Lelliottia sp.
  source 1..189: mol_type = other RNA; note = Related to NZ_PKFV01000007.1
aatggtataataaatgagatttcttcgtcgatagattaaggggccttgcttgttaaggtgaagtcatgaacttcctagccctgtctctactagctcggcatcctggggttaccagtagcgcttttgaggcacgtaaacgtgaaaagacgttcattgtatcaacgcagagatcttttttatgctcaaatt

SEQ ID NO: 17691 - RNA, 183 nt, Aliivibrio fischeri
  source 1..183: mol_type = other RNA; note = Related to MAJY01000007.1
tatgatattatctcccacgtttcgaattcgatagaataagggggcttgtttcgacaagcgagcgctggacgctcctagctctaatattagctagttaagattaatttggcttaatgagtgtacttttaaggcacgaacgtgaaaagatgttcaaagtatcgagattgaaacaatgaataaaaa

SEQ ID NO: 17692 - RNA, 189 nt, Pseudoalteromonas sp.
  source 1..189: mol_type = other RNA; note = Related to JAKGAW010000004.1
tctgatattataaataaagtttccgcttcgatagagtagggacttatgctactacaggtaagtgattgcttgtcattcctagcccattaatggttaatcaaggctacttgtcgactaggcagccttttagcccacaaagtgaaaagatgttcttgtatcaaagcggaaacaataacttatggacaaaat

SEQ ID NO: 17693 - RNA, 190 nt, Shewanella sp.
  source 1..190: mol_type = other RNA; note = Related to BPFA01000013.1
tatgatatagtacaaaaattctaaagcgatagatttatggggctttgatactaaagttaacgctagccgttattaacccagtggtcactaattacgataaattggtcgcaatgatgacctttcatcagcacgcaaagcgtgaaaggatgttctaggtatcgtatttggaattttaattcatgaaaataat

SEQ ID NO: 17694 - RNA, 216 nt, Pseudoalteromonas sp.
  source 1..216: mol_type = other RNA; note = Related to NZ_AKXJ01000001.1
tccgatattattaaaaaggtttcttcctcgatagctcaggagggcttgtacgcaagtcgcaatgggtagagtcgaaatactttaaacagagctcagctcctaacagtcactagatgtgcgaggttatcatcatactttaatggtcgctttaagtgcacacagcgtgtaaagattgttcttttgtgtcaaggaagaaaccctaatcatgaaatataa

SEQ ID NO: 17695 - RNA, 218 nt, Vibrio vulnificus
  source 1..218: mol_type = other RNA; note = Related to BA000037.2
ttcgatattattaggaaggtttcttcctcgacagctcaggagggcttgcactcaagtcgcaatgggtagagtcgaaatactttaaacaaagcttagctcctaacagtcagtagctgtgcgcagttagcatcatactttaatgttaactttaagggcacacggcgtgtaaagattgttcttttgtgtcggggaagaagccgagatattatgaaatataa

SEQ ID NO: 17696 - RNA, 218 nt, Vibrio brasiliensis
  source 1..218: mol_type = other RNA; note = Related to JAKEUX010000001.1
ttcgatattatcaggaaggtttcttcctcgatagccaaggaggacttgtacgcaagtcgcaatgggtagagtcgaaaggctttaaacaaagcttagctcctaattgtcagtagcagtgtgcggtttccatcatgctttaatggtaactttaagtgcacacggcgtgtaaagattgatcttttgtgtcgaggaagaaacctagatcttatgaagtacaa

SEQ ID NO: 17697 - RNA, 218 nt, Vibrio parahaemolyticus
  source 1..218: mol_type = other RNA; note = Related to JABCDA010000001.1
tccgatatcatacggaaggtttcttcctcgatagctcaggagggcttgtccgcaggtcgcaatgggtaaagcccacaaggctttaaacaaagcttagctcctaacattcagtagctgtgtaaggttgccatcatactttaatgggaactttaaatgcacacggcgtgtaaagattggtcttttgtgtcgaggaagaaaccaaaactcatgaaatataa

SEQ ID NO: 17698 - RNA, 217 nt, Vibrio splendidus
  source 1..217: mol_type = other RNA; note = Related to NZ_PIFZ01000001.1
tctgatattatcaggaaggtttcttcctcgatagcgcaggaggacttgcacgcaagtcgcaatgggtaaagttggaaaactttaaacaaagcttagctcctaacagtcagtagctgtgcgccgtttccattatgctttaatggtaactttaaggcacacggcgtgtaaagattggtattttgtgtcgaggaagaaaccgttatattatgaaatatag

SEQ ID NO: 17699 - RNA, 209 nt, Vibrio alginolyticus
  source 1..209: mol_type = other RNA; note = Related to CP087877.1
tcggatatccttaagaaggtttcttcctcgatagctttgagggacttacatgtaagttgatacgggtagggtttttggctctaaactatcttaacctcaacattgactagctgagcttgtccaagtgtactttaatgtaaactttaaggctcacggcgtgtaaagattgaactttgtgtcgtggaagaaaccattacaatgaaaaacag

SEQ ID NO: 17700 - RNA, 201 nt, Raoultella terrigena
  source 1..201: mol_type = other RNA; note = Related to CABDVD010000002.1
tatggtattatcaggaaggtttcttctgcgatagcttagagggatctcgaatcgaaacgtatgaagcttgcttcatactttccatagcctcttgatttactagctgatctggccaacggttgctctttaagcggcctttaatgctcacggcgtgtaaagattgaactttgtatcgtggaagaaaccaactatgattaagag

SEQ ID NO: 17701 - RNA, 193 nt, Vibrio fluvialis
  source 1..193: mol_type = other RNA; note = Related to JAHUCN010000002.1
tcagatatccttaggaaggtttcttctgcgatagcctagagggatcttgtatcgaatcgtacttcgtacattcctagcctcgtgattcactagctgtactcgtcatagtttacgctttaaatgttctttaaggctcacggcgtgtaaagattgaactttgtatcgtagaagaagccaccttgatgataaaaag

SEQ ID NO: 17702 - RNA, 193 nt, Klebsiella pneumoniae
  source 1..193: mol_type = other RNA; note = Related to NZ_CP057313.1
ataagtataatagagaaagcttcttcttcgatagaagctgaggaattcagtctatctggataaggtgttcgccacctctagcctcagtaaaaactagctcgtcctttgcgcagttggcgccatggatgactttaatactcacagagtgtaaagattggtcttggtatcggagaagaagctttatgaaaaataa

SEQ ID NO: 17703 - RNA, 193 nt, Providencia rettgeri
  source 1..193: mol_type = other RNA; note = Related to DAFBNF010000007.1
attagtataatagataaagcttcttcttcgatagaagctggggaatccagtttatctggataaggtgttcgccacctctagtctcagtaaaaactagctcatcctatgcgcacttggcgccatggataactttaatactcacagagtgtaaagattggtcttggtatcggagaagaagccttatgaaaaaaca

SEQ ID NO: 17704 - RNA, 193 nt, Citrobacter freundii
  source 1..193: mol_type = other RNA; note = Related to CP018810.1
attagtataatcgaacaagcttcttcttcgatagaagctgaggagtccagtttgactggataaggtgttcgccatctctagcctcagtaaaaactagctcatcctttgcgcacttggcgccataggtaactttaatactcacagagtgtaaagattggtcttggtatcggagaagaagctttatgaagacgaa

SEQ ID NO: 17705 - RNA, 192 nt, Pantoea agglomerans
  source 1..192: mol_type = other RNA; note = Related to JACYMS010000012.1
ataactataatacaaaaagcttcttcttcgatagaagctgaggtagtcagttaatctggctaaggcgttcgacgcctctggcctcagtaaacactagcctatcctattcgcgtttggcgtcatggatgctttaatactcacagagtgtaaagattggtcttggtatcggagaagaagctacatgaaaaacaa

SEQ ID NO: 17706 - RNA, 181 nt, Pantoea eucalypti
  source 1..181: mol_type = other RNA; note = Related to NZ_JACSXJ010000009.1
atatctataatagagcaggcttcttcttcgatagattcaggggagtataactgagcgattgtcgttcctagcccctgcaaacactagtttgccgccgccaatttgtcgcgatggccgctttaagcctcacggggtgtaaagatggtcttggtatcggagaagaagcttttatgaaagaaaa

SEQ ID NO: 17707 - RNA, 179 nt, Klebsiella pneumoniae
  source 1..179: mol_type = other RNA; note = Related to PDLA01000006.1
atatctataatagagcaagcttcttcttcgatagatataggggagtttcactgaacgattgtcgttcctagcccctgcaaacactagtttgccgccgccaattgtcgcgatgtccgctttaagcctcacggggtgtaaagatggtcttggtatcggagaagaagctttatgaaagaaaa

SEQ ID NO: 17708 - RNA, 185 nt, Morganella morganii
  source 1..185: mol_type = other RNA; note = Related to CP064054.1
tcacatattatagatcatgcttcttcttcgatagaagctggagggctcaaatgagttgacgcatgtcgtcacgtgctccagcaaacactagcttagattgctctgcgtccgctaagccactttaagcctcacggggtgtaaagatgttatgggtatcgaagaggaagcttttttatgaaacataa

SEQ ID NO: 17709 - RNA, 185 nt, Escherichia coli
  source 1..185: mol_type = other RNA; note = Related to CP057173.1
tcgcatatcatcgatcatgcttcttcttcgatagaagctggagggctcaaatgagctgacgcatgccgtcacttgctccagcaaacactagctcggattgtcttgcgtccgctaagccgctttaagcctcacggggtgtaaagatgttattggtatcgaagaggaagcttttacatgaaacataa

SEQ ID NO: 17710 - RNA, 185 nt, Serratia marcescens
  source 1..185: mol_type = other RNA; note = Related to NZ_MJAO01000006.1
tcacatattattgatcatgcttcttcttcgatagaagctggaggactcaaatgagttgacgcatgccgtcacttgctccagcaaacactagctcggattatcttgcgtccgccaagccgctttaagcctcacggggtgtaaagatgttattggtatcgaagaggaagcttttttatgaagcacaa

SEQ ID NO: 17711 - RNA, 185 nt, Proteus mirabilis
  source 1..185: mol_type = other RNA; note = Related to SCIO01000007.1
tcgcatatcttagatcacgcttcttcttcgatagaagctggggaactcaaatgagttgacgtttgtcgtcacttgctccagtaaacactagcttgggtaatctcgcattcgccaggccgctttaagcctcacggggtgtaaagatgttattggtatcgaagaggaagcttttttatgaaacataa

SEQ ID NO: 17712 - RNA, 184 nt, Marinomonas shanghaiensis
  source 1..184: mol_type = other RNA; note = Related to NZ_QGOK01000008.1
tcgtatattttagagcaagcttcttcttcgatagaagtggggggtgttcgcacctgatcgtttaacgattctagccctaatttactatctatctgtcaactatgcctttaagttgctagcaactcacggtgtgtaaagattgttcatggtatcggagaagaagctttcctcatatgtttaaaaa

SEQ ID NO: 17713 - RNA, 186 nt, Alteromonas sp.
  source 1..186: mol_type = other RNA; note = Related to NZ_LR136958.1
gatgatatcatcaaaagagtttctttttgatagagtatagagactgatgtttacatcagtgagtgccctgacgctccgagctcttaattaccaactctgagcctggtctcaccgacacgtaacttttagtccacgagcgtgaaaagatgtttttagtatcaaaagaaactattaaatgaaaaagtt

SEQ ID NO: 17714 - RNA, 202 nt, Rahnella inusitata
  source 1..202: mol_type = other RNA; note = Related to JACHBV010000002.1
tctagtatgatagaaatgcttcgtctcgatagagagaaagggaccatgtaaatggtttaagatctgctttgtcggacttgactagccctaataagaaacagttcctcctacgatggtatgattttctcggatgaacttttagtttcactgctcgtgaaaagttgttcttggtatcgggacgaagcacatttacaaatattat

SEQ ID NO: 17715 - RNA, 203 nt, Curtobacterium plantarum
  source 1..203: mol_type = other RNA; note = Related to NZ_RHDS01000003.1
tatagtatgatagataagcttcgtctcgatagagggtaaggggccatgcaaatggttcaagatctgattcgtcagacttgactagccctaataaagaccagttcctcctacgatgttatgattatcttggatgagcttttagtttcactgcccgtgaaaagttgttcttggtatcgggacgaagcacattttatacattatta

SEQ ID NO: 17716 - RNA, 203 nt, Pectobacterium brasiliense
  source 1..203: mol_type = other RNA; note = Related to NZ_CP059956.1
tatagtatgcttgaaaagcttcgcctcgatagaattaaaggggtcacgtaagtgatacaagatctatctaggtagacttggctagccctaataactaccagtttagctatgattattatagttgtcttagataaacttttagtttcactacacgtgaaaagttgttcttggtatcggggcgaagcgtttttgattttttcatt

SEQ ID NO: 17717 - RNA, 223 nt, Yersinia enterocolitica
  source 1..223: mol_type = other RNA; note = Related to UHIX01000001.1
aatgctataatattaaagctccagaactgatagatatcgagggtattttccaaagtaaaagcttaatctcaaatggataatatgtgtagcataagactcaccaagcctcatgtaattaccagtttcgatttgttattttgacgataatcgtaaagtatacttttaattacacaacgtgaaaagttgttatttgtatcagttctggagtttccatgttaaacaa

SEQ ID NO: 17718 - RNA, 221 nt, Serratia marcescens
  source 1..221: mol_type = other RNA; note = Related to FCGU01000001.1
aatgatataatagccaagctccagatctgatagataatgagggtgtattcattactaggcttaacctcatgagtacatgtgtagcacaagactcaccttgcctcgcgtaattaccagtttcgatttgtcatcttgttgataatcgtaaattacacttttaattacacaacgtgaaaagttgttatttgtatcagatctggagttttcattatgttaaaaaa

SEQ ID NO: 17719 - RNA, 211 nt, Proteus columbae
  source 1..211: mol_type = other RNA; note = Related to NZ_CP043925.1
tctgatataataaaaaatctccggttttgatagtttgaagggcacagtcacaggagcttaacctgattgtgtgctagcttaggtctggcctagcctgcattaaccagttagcttatgatttccctattggaatgttaaaggttacctttttaattgcacagagtgaaaatctgttattggtatcaagatcggagttttttatgattaagtt

SEQ ID NO: 17720 - RNA, 212 nt, Pectobacterium brasiliense
  source 1..212: mol_type = other RNA; note = Related to NZ_CP063241.1
agtagtattttagacagacttcggttccgatagataaaggggtcataaatatttttgaatttatgacgaacgcttgacgttcctatggtcagattttggtctgatcagcctattattgactagctggtctcattagtcttacgtagactttgtaagccactaaagtgaaagtctgttcattgtatcggaaccgaagtaatcatgaataagat

SEQ ID NO: 17721 - RNA, 212 nt, Pectobacterium brasiliense; identical to SEQ ID NO: 17720
  source 1..212: mol_type = other RNA; note = Related to JACHAN010000001.1

SEQ ID NO: 17722 - RNA, 210 nt, Citrobacter freundii
  source 1..210: mol_type = other RNA; note = Related to CP056181.1
agtgctattatagaaaaacttcggttccgatagataaaggggtcatgagttttttaatttatgacgaacgcttgacgttcccatggttagattttgttctgaccagcctattatttactagcgggtctcactagtctcaggtagactttctggggcactaaagtgaaagtctgttcattgtatcggaaccgaagtaaccatgaataagat

SEQ ID NO: 17723 - RNA, 207 nt, Pantoea agglomerans
  source 1..207: mol_type = other RNA; note = Related to NZ_WHOZ01000001.1
agtgctatttttaaaaagcttcggttccgatagataaaaggatcataagtttttgatttatgatgagcgcttgacgttcctatgttcagatttttctgtacagcctattattgactagctggtctcaatggtctcaggtagcctttctggggcactaaagtgaaagcctgttcattgtatcggaatcggagtaaccatgaaaaaaat

SEQ ID NO: 17724 - RNA, 196 nt, Proteus mirabilis
  source 1..196: mol_type = other RNA; note = Related to JADSTY010000052.1
aatgagataatagacaagcttcggttccgatagatattgggggcataattatgttggttgcttgacagccctatagtcaaattttttggctagcccaacattaactagctggtctcactggtcatagtttaacttttaggccactaaagtgaaagtctgttcattgtatcggaatcgaagtaattatgaaaaaaat

SEQ ID NO: 17725 - RNA, 193 nt, Arcobacter sp.
  source 1..193: mol_type = other RNA; note = Related to NVWN01000005.1
atgtcaattaaagaaaaactttagtttgatagacttggaattttattacttacgagtaaagaaatatatgcttgacatatctagtccttcaactactaatttgcttagatttttacaacgccttacagttgttggatccactgttgtgaaaaattgttctttgtatcaaactaggtttttttatgtataaaat

SEQ ID NO: 17726 - RNA, 196 nt, Sulfurovum sp.
  source 1..196: mol_type = other RNA; note = Related to JAIZPA010000057.1
acaagtattgaaaccaagctaccgtctgataggtaagggactttgttactctcgagtaataaagtatatgctggacatatctagcccaaaaagtactagttcgcgctacttagctttagccttgactgatgctcacagtaaacttgtgagtcgttgttcttttgtatcagacacaaggtttcaatatgggtaaaat

SEQ ID NO: 17727 - RNA, 197 nt, Sulfurimonas sp.
  source 1..197: mol_type = other RNA; note = Related to MICC01000016.1
atgcttatcgaaaaaaaactttagtctgataggtaagggattttatcacatttatgttttaaagtgtatgcttgacatacctagcctaaaaactactaagctgtcgctgttcagtatacgatatactggtagcgttgactcacgtgccgtgagatgttgttcattgtatcaggctaaagttcttcgatgaaaaaaat

SEQ ID NO: 17728 - RNA, 193 nt, Aliarcobacter vitoriensis
  source 1..193: mol_type = other RNA; note = Related to NZ_PDKB01000007.1
tttgatataataacacttgtcgaaaagtctctatctgatagataagggatttaaaatgaattttttaaatatatgcttgacgtatctagcccaaaaagtactattgatttacagcattttagataaatctttagtccactttgtgaaatattgtaatttgtatcaggtatggtagcttttcgatgaaaataaa

SEQ ID NO: 17729 - RNA, 191 nt, Pantoea sp.
  source 1..191: mol_type = other RNA; note = Related to NZ_VWUH01000001.1
tatagtatattaaacaggcttcgcacctgatagggataggggccatttggtggcgcaagctggacttgcctagccctatagctaccagcttcctcctaggcgtcacaggggttactggtcgcacttttagtgttcacgacacgtgaaaagatgttctttgtatcagggcgaagcttttttattaaaatgcc

SEQ ID NO: 17730 - RNA, 194 nt, Lelliottia amnigena
  source 1..194: mol_type = other RNA; note = Related to JAENMR010000003.1
tttagtataatacataggcttcgcacctgatagacagaggggccattctttggcacaagcttgacttgtctagccctacagttaccagctcgcctcctaagcatcactaggtttactggtcgcacttttagttttcacggcacgtgaaaaggtgttctttgtgtcagggcgaagctttttttaacaaagtagaa

SEQ ID NO: 17731 - RNA, 194 nt, Serratia liquefaciens
  source 1..194: mol_type = other RNA; note = Related to NZ_CP011303.1
tatagtataataaacaagcttcgcacctgatagatatagggaccatgacctggtacaagctcgacttgtctagccctttcaactaccagctcgcctctcagctatgcggtgatgcggtaagcgtacttttagttatcacgacacgtgaaaagatgttctttgtatcagggcgaagccaccctctttaacttaaa

SEQ ID NO: 17732 - RNA, 231 nt, Photobacterium arenosum
  source 1..231: mol_type = other RNA; note = Related to NZ_JACYTP010000002.1
tatgatatcattcgtatgcttcaacccgatagtagaggggagatatgagtttcgacaagtatctgagagcttgcctctcccgctctttgcttgagggagtccaacttctttttgctttgggcatagtcctaatgactgctaatctggtcgctctgattagtatgtgtcgaagtacacacctacggtgtaatggtgttcttttgtatcgggttgaagctctatgattaaaaa

SEQ ID NO: 17733 - RNA, 229 nt, Vibrio maritimus
  source 1..229: mol_type = other RNA; note = Related to BBMT01000003.1
tatgatatcattcgtatgcttcaaccgatagtagagggagatatgagtttcgacaattatctgagagcttgcctctcccgctctttgttagagagagttcaacttctctcttctttgggcatagtcctaatgactactaatctggtcactgtgattagtatgtgtcgaagtgcacacctacggtgtaatggtgttcttttgtatcgggttgaagctctatgatcaagaa

SEQ ID NO: 17734 - RNA, 234 nt, Klebsiella pneumoniae
  source 1..234: mol_type = other RNA; note = Related to JAJRLY010000005.1
tatgatatcattcgtatgcttcaacccgatagtagaggggagatatgagtttcgacaaatatctgagagcttgcctctcccgctctttgcttgaggaagtccaacttctttttgctttgggcatagtcccaatgactgctaaactagtcactctgattagtatgcgtcggagtacacacctacggtgtaatggtgttcttttgtatcgggttgaagctctatgatgaaaaataa

SEQ ID NO: 17735 - RNA, 230 nt, Vibrio sp.
  source 1..230: mol_type = other RNA; note = Related to LWEH01000044.1
tatgatattattcgtatgcttcaacccgatagtagaggggagatatgagtttcgacatatatctgagagcttgcctctcccgctccttgcttgaaaaagtccaacttcctctagcttcgagcatagtcctaatgattgctaatttagtcactgtgattattgtgcgctaaatacacacctacggtgtaattgtgttcttttgtatcgggttgaagctctatgattaaaaa

SEQ ID NO: 17736 - RNA, 231 nt, Pseudoalteromonas sp.
  source 1..231: mol_type = other RNA; note = Related to NZ_PNDJ01000020.1
tatgatattattcgaaggcttcaacctgatagtagaggggagatatgagttattacgagtatctgagagcttgcttctccagttctcagccacagaaaacctgttcttctgtggctttgagcgcagccccaataggcactaatctgatgtcgccgattagcatgcttctaagtcacacctacggtgtaatggtgttcttttgtatcaggttgaagcatctatgattaatac

SEQ ID NO: 17737 - RNA, 234 nt, Vibrio alginolyticus
  source 1..234: mol_type = other RNA; note = Related to UHIJ01000001.1
tatgatattattcgtatgcttcaacccgatagtagaggggagatatgagttttcacgagtatctgagggcttgcccctccctctctttgtttctgggagttcgtcttccagtaactttgagtacagtcccaatagttactaatctggtcgcgctgattaatgtgtctgatagtacacacctacggtgtaatagtgttcttttgtatcgggttgaagcaatataatgaataaaaa

SEQ ID NO: 17738 - RNA, 200 nt, Pseudoalteromonas byunsanensis
  source 1..200: mol_type = other RNA; note = Related to NZ_MNAN01000032.1
gatgatataattaagcggcttcaacccgatagtagaggggagataaaattgtaaagtctttatctgagggcctgttcctccagtcttcggacatagtcccattgattaccactcagttggctatattagcgtgtagaggggtcacacctgcggtgtaatgatgttcttttgtatcgggttgaagcacctatgaataataa

SEQ ID NO: 17739 - RNA, 230 nt, Vibrio alginolyticus
  source 1..230: mol_type = other RNA; note = Related to CP017889.1
tatgatattattcgtatgcttcaacccgatagtaggggggagatatgagttattacgagtgtctgagagcttgcctctcccgctcattgattcaaggggttcgccctctttttgatttgagcacagtccctgtagttactaacttggtcgctacgattaatgtgatgtcgattcacacctacggtgtaatgatgttcttttgtatcgggttgaagcacaatgattaataa

SEQ ID NO: 17740 - RNA, 231 nt, Salmonella enterica
  source 1..231: mol_type = other RNA; note = Related to CP079839.1
tatgatatcatcagaaggcttcaacccgatagtagaggggagatatgagtttttacgagtatctgagggcttgcccctccagtttgatgccattaagtgaaagttgctttttggctttaagcatagtcccaatagtgactaacctagtcactcgtattagtgtaaccgatgagtcacacctacggtgtaatgttgttcatttgtatcgggttgaagcaatatgaaaaataa

SEQ ID NO: 17741 - RNA, 192 nt, Vibrio sp.
  source 1..192: mol_type = other RNA; note = Related to NZ_JACVEG010000002.1
tatgatattataagaatgcttcaacccgatagtagaggggagatatgagtctagtacgaatatctgagagctggtctctcctagtcccaataattgccatttcaattggccatattattagtgtgcttaaaggtcacacctacggtgtaatgatgttcttttgtatcgggttgaagcacttatgaagaaaat

SEQ ID NO: 17742 - RNA, 208 nt, Pseudoalteromonas sp.
  source 1..208: mol_type = other RNA; note = Related to NZ_WTLC01000042.1
tatgatattattcgaaagcttcaatccgatagtagaggagaggtatgagtctagtgcacatatcagagggcttgttcctccagcttttgaaagaaagcacagctccaatagtcactatcctatgcatgttgaattagtgtctgaatagttcacacctacggtgtaataatgttcttttgtatcggattgaagcaaacatgaaaaaaat

SEQ ID NO: 17743 - RNA, 194 nt, Aeromonas dhakensis
  source 1..194: mol_type = other RNA; note = Related to NZ_RJCW01000006.1
aatgatataatcgatatgcttcaacccgatagttgaggagtgatgtacgagccaagctctgcattagagggctagaccctcctagttcctatagttactagccatctagttggcgatcattagtggtctagtggcacaccttcggtgtaattttgttcttttgtatcgggttgaagcataaatatgaacgaaat

SEQ ID NO: 17744 - RNA, 199 nt, Kosakonia cowanii
  source 1..199: mol_type = other RNA; note = Related to CP069319.1
tatgatataatccagaggcttcaacccgatagttaatgggagatataagcttcggtttatatctgagggctggaccctcccgtcgtttgacatagcccacgagtgactagttggcatcacgtgtgattagtctctggaaggcacacctgcggtgtaacgttgttctttgtatcgggttgaagcaactaatgaaattaat

SEQ ID NO: 17745 - RNA, 198 nt, Kosakonia oryzendophytica
  source 1..198: mol_type = other RNA; note = Related to FMAY01000002.1
catgatattatccaaaggcttcaacccgatagttaacgggagatataagcttaggtgagtatctgagggctagtccctcctgtcttttgacatagcccacgagtgactagttagcatcaggtgtgattagtcgctggaaagcacacctacggtgtaacattgttctttgtatcgggttgaagcactaatgaaattaat

SEQ ID NO: 17746 - RNA, 231 nt, Vibrio kanaloae
  source 1..231: mol_type = other RNA; note = Related to NZ_CP090019.1
catgatatattgacaaggcttcaacccgatagttaaagggagacgagtggttcactccacccattgagggtaaagcccttccacgaggttagaataatcttcatccaggttgttttttcctccgagtcccagaattatcaaatgattacaatttataaatgttatcattcggtcaccttcggtgtaactttgttcttttgtatcgggttgaagcaacattatgaaaaaaat

SEQ ID NO: 17747 - RNA, 231 nt, Photobacterium carnosum
  source 1..231: mol_type = other RNA; note = Related to WMDK01000003.1
tatgctatattgaacaggctttatcctgatagacttcagagatcattatctcaatagggttaatgacaagagggaactcttcaggagtttgacttcaactatttatagatgattttgagctccaacgtctctagatcacagcttgattacagttatgtcaatgtgttcaatgtgtcacacagtgaatttttgtttttgtatcaaagataaagcgtattatatgtcaaaata

SEQ ID NO: 17748 - RNA, 231 nt, Vibrio cyclitrophicus
  source 1..231: mol_type = other RNA; note = Related to MCSX01000068.1
tatgctatattgaacaggctttatcctgatagacttaagagatcactatctcatgttagttagtgaaaagaggtaactcttcagaagtcaaatatccatcttagttggtggtgattgatctcaacgtctctaaacggtagcttgattaccgttatgttaaatgtgttcaaagtgtcacgcagtgaatttttgtttttgtatcaaagataaagcgtattgtatgtcaaaata

SEQ ID NO: 17749 - RNA, 198 nt, Aeromonas hydrophila
  source 1..198: mol_type = other RNA; note = Related to JAEHJS010000001.1
catggtatggttaacttgctctcttttgatagcacaagggaatgaatttcgattcattgcacgggtaacctgccagcacattttaagtaatgtgcatcgtccctatacaccagccatgtcgacgtgtcgacgctggccactgggtgtcacgcagtgatggcgtggattgtatcaaaagagggcctttatgaataaaac

SEQ ID NO: 17750 - RNA, 232 nt, Citrobacter freundii
  source 1..232: mol_type = other RNA; note = Related to CP057863.1
gatggtatcatcagaaatgtttacattcggtagtaatagagattgccttgtgcaatgtaggggaacctaccatctatctttgcgacagtgtagattttatatcattagtaaaattttatgcttaagcttggttagaacagtctccacataccagtgtgattactttgatattcgcgcattatgtgtcacacgtgaatgtttgtttttgtatcggattaaacatgaaaataac

SEQ ID NO: 17751 - RNA, 179 nt, Pseudoalteromonas rubra
  source 1..179: mol_type = other RNA; note = Related to PNCI01000020.1
tatgttacaatttctcagctacgttacggtagctaaaaggggaaagcttgctttaaaaggtcactacctttcaagcccttatttactagctccatgacgcctagtagttcgcttctaaagcttcactaaagtggaactttgtaatttgtaccgtgacgtagctagcttatgaaattatc

SEQ ID NO: 17752 - RNA, 178 nt, Pseudoalteromonas citrea
  source 1..178: mol_type = other RNA; note = Related to NZ_AHBZ03000021.1
tatgatactatttctcaactacgttacggtagttagaaggggaaagttcgctttaaaaggttgttacctttcaagcccttatttactagctccatgcgcctagtagttcgattctaaaatcccactaaagtggaactttgtaatttgtaccgtaacgtagcctacttatgaaattatc

SEQ ID NO: 17753 - RNA, 179 nt, Pseudoalteromonas sp.
  source 1..179: mol_type = other RNA; note = Related to NZ_CP045418.1
tatgatactctttctcagctacgttacggtagttcagaaggggaaagcttgctttaaaaggttgtcacctttcaagcccttatttactagctccatatgtctagtagttcgattctaaaatcccactaaagtggaactttgtaatttgtaccgtaacgtagccaacttatgaaattatc

SEQ ID NO: 17754 - RNA, 178 nt, Shewanella algae
  source 1..178: mol_type = other RNA; note = Related to NZ_CP055159.1
tatggtataatctccgagctacgttacggtagctaacggggaaagttcgcttttgaaggttgttaccttccaagcccttgtttactagttatattacaatgtgtcgacagttttgatgacactaaagtgaaactttgtaatttgtaccgtaacgtagcgattataaaatgaaaaaaat

SEQ ID NO: 17755 - RNA, 177 nt, Pseudoalteromonas sp.
  source 1..177: mol_type = other RNA; note = Related to JADYXO010000004.1
tatggtattattactcagctacgttacggtagctgacggggaaagcttgctttcaaaggttgttacctttccagcccctgttcattagatgtatcactcgctattcgtagtttgctgatcactgaagtgaaactttgtaatttgtaccgtaatgtagcaaataattatgtcaaaaat

SEQ ID NO: 17756 - RNA, 223 nt, Pseudoalteromonas sp.
  source 1..223: mol_type = other RNA; note = Related to JADYXL010000003.1
catgatataataacaaggcttcaatctgataggtaatgggaacggtttagttattaatttaacttaattgtaagggcttgtcccttcatgaacttaatataactagttcataaataaataaatagtctctcagtcagcagttcattgtcagcgtgtctgagtactcaaggtcacatgtgcaactctgaaaatgtatcagattggagcaattgatgaaaacaat

SEQ ID NO: 17757 - RNA, 144 nt, unidentified
  source 1..144: mol_type = other RNA; note = Related to JAFDVW010000003.1; note = Acidobacteria bacterium
tccaagccggtccataggcagcttcggctccattggatctctctggggttaccccaggggaacgtgcatagcttaggtttcatcgcgtgaacggccctgcgcggccgcgcagacatggtcacgcacagtgagactcgttggttg

SEQ ID NO: 17758 - RNA, 149 nt, unidentified
  source 1..149: mol_type = other RNA; note = Related to JAFAPG010000514.1; note = Acidobacteria bacterium
tccaagcatagcttgtcttgagccctagtggcttggtcaggcttctccggggttaccccggggcaacgtgaaaaactgacaattcgtcgcgtgagctttgctgcgcgccagcgcaggcggggctcatgcagagtgagactggttggagc

SEQ ID NO: 17759 - RNA, 145 nt, unidentified
  source 1..145: mol_type = other RNA; note = Related to QHZV01000271.1; note = Acidobacteria bacterium
tccaagctggtttgatcgagctttcgggctcggttgggcctctctgggggttaccccaggggaacgtgaagaactgacattccggcgctagagcttaactgcgcgttgcgcaggcctgctcatgcaaggtgggactcgttggagt

SEQ ID NO: 17760 - RNA, 147 nt, unidentified
  source 1..147: mol_type = other RNA; note = Related to JAIQGJ010000043.1; note = Acidobacteriia bacterium
tccaagccggtctgatcgagctcttttgggttcggtttggcctctctggggttaccccagggaattgcgagacctcgggatttcatcgcgtgagcggccctgcgcgactgcgcagatttgctcacgcaaggcaagactcgttggagc

SEQ ID NO: 17761 - RNA, 147 nt, unidentified
  source 1..147: mol_type = other RNA; note = Related to QHYC01000242.1; note = Acidobacteria bacterium
tccaagcttggcttttatcgagctctcgggctcggtttggcctccctggggttaccccagggaaacgtgaagaactgagatttcgtcgcgtgagcttcgctgcgcgactgcgcaggcctgctcatgcaaggtgagactcgttggagc

SEQ ID NO: 17762 - RNA, 136 nt, unidentified
  source 1..136: mol_type = other RNA; note = Related to QIAA01000032.1; note = Acidobacteria bacterium
tccaagcggaccttcgggtttgctttgagcctctctggggttaccccaggggaacgtgaacgactaggctttcatcgcgtgagcggcgctgcgcgactatgcagttatgctcacgccgggtcagacaggttggggc

SEQ ID NO: 17763 - RNA, 147 nt, unidentified
  source 1..147: mol_type = other RNA; note = Related to JAFDVQ010000015.1; note = Acidobacteria bacterium
gccaagccgggcttgcatcgggactcgcgttccggtgcggtcctctccggggctaccccagggaaaagtgaataactggagattcatcgggtgatctcaaccacgcgctgcgtggggctgatcacgcaaggccagactcgttggcgt

SEQ ID NO: 17764 - RNA, 145 nt, unidentified
  source 1..145: mol_type = other RNA; note = Related to JAFAQG010000033.1; note = Acidobacteriaceae bacterium
tccaagccggtgcgaatcgggccttgccgttcggttccatctctccggggttaccccggggtaacgtgaagaactcacatttcgtcgcgtgaggttcgctgcgctccgcgcagaacttctcacgcagtgccagactcgttggggc

SEQ ID NO: 17765 - RNA, 147 nt, unidentified
  source 1..147: mol_type = other RNA; note = Related to QIAH01000498.1; note = Acidobacteria bacterium
tccaagctggtgtggaacgggctctcgtggcccgcctgcatctctctggggctaccccagggaaacgtgtagagctgacaattcgtcgcaagaccttctctgcgagtccacgcaggactggtcatgcaaggtgagactcgttggagc

SEQ ID NO: 17766 - RNA, 148 nt, unidentified
  source 1..148: mol_type = other RNA; note = Related to JAFKEE010000018.1; note = Acidobacteria bacterium
tccaagctcggtctggatcggtctccaatggtcggttcagcctctctggggttaccccagggcatcgggaatagccaggcattcgtcgcgtgcgcttcggctgcgctgtcgcgcagttctgcccacgccaggtgagactcgttggagc

SEQ ID NO: 17767 - RNA, 148 nt, Paludibaculum fermentans
  source 1..148: mol_type = other RNA; note = Related to NZ_CP063849.1
tccaagctcggtctgaatcggtcattcgtgttcgattcagcctctctggggttaccccagggcatcgggaatagccaggcattcgtcgcgtgtgcttcggctgcgctgtcgcgcagttctgcccacgccaggtgagactcgttggagc

SEQ ID NO: 17768 - RNA, 148 nt, unidentified
  source 1..148: mol_type = other RNA; note = Related to JACJWB010000023.1; note = Bryobacterales bacterium
ctcgagctcggcgttggttgagcgtttacgtttgacccctcgcctctccggggataccccgggggatgttggtgtgtctccattgcagcgcgcgagcttcgccgcgtccgaagcggaaccgctcgcgcagggtgggattggtcgggtt

SEQ ID NO: 17769 - RNA, 147 nt, unidentified
  source 1..147: mol_type = other RNA; note = Related to JACMLA010000763.1; note = Bryobacteraceae bacterium
tccaggccgggccgtcgctggaatcttcggattcggttaggtctctctggggctaccccagggcatcactctaagcaggcaattcgtcgcgcgagcaaccctgcgctgtacgcagaaacgctcgcccaaagtcagactcgctgggta

SEQ ID NO: 17770 - RNA, 144 nt, unidentified
  source 1..144: mol_type = other RNA; note = Related to JAFAUE010000361.1; note = Acidobacteria bacterium
ttcaagttggctcgggttgggcttaggcccaatttgggtctccctggggataccccagggaatggagaatgactgggatttcgtcgcatgagcgaccctgcctaaaaggcagacctgctcacgcagagtcagactggttgagcg

SEQ ID NO: 17771 - RNA, 150 nt, unidentified
  source 1..150: mol_type = other RNA; note = Related to JAEUQG010000434.1; note = Bryobacterales bacterium
tccaagcgctggtgcaatcgagcccctgaggtccggttcgccttctccgaggctacctcgcgaggattgtgttacgccgccattgcgtcgcgtgcgcgcgtctgcactgagcgtgcagtacagcgcacgccgggttggacaggttggatc

SEQ ID NO: 17772 - RNA, 151 nt, unidentified
  source 1..151: mol_type = other RNA; note = Related to JAFDVS010000120.1; note = Acidobacteria bacterium
tccaagcaaggtgtcatgcgtgctttcgtggcccgtatgcgccactccgaggttacctcgggggtattttctgatgtcgccgattcgtcgcgtgagcgtgcactgcgcctgacacgcagatgtgctcacgccatgtaggacaggttggacc

SEQ ID NO: 17773 - RNA, 146 nt, unidentified
  source 1..146: mol_type = other RNA; note = Related to JAFDVZ010000005.1; note = Acidobacteria bacterium
ttcaagctaggcggcatcgggctttcgggttcggttacgcctctccggggataccccgggggagaggtttgagttcgcatttcgtcgcgtgaggcccgccgcgctccgcgcggatcagctcacgcatccgtcagacacgttggagc

SEQ ID NO: 17774 - RNA, 146 nt, unidentified
  source 1..146: mol_type = other RNA; note = Related to JAIEMJ010000003.1; note = Bryobacteraceae bacterium
tcccagcttggcgccagaccgttcggtgcctctctggggttaccccagggaatttctgtagtagtccgtttcgtcgcgtgagcgggcgcctgcggcgcactacgcttcgcgtagatctgctcactcctggtgagatacgtgggagc

SEQ ID NO: 17775 - RNA, 144 nt, unidentified
  source 1..144: mol_type = other RNA; note = Related to AP025252.1; note = Bryobacterales bacterium F-183
tgcaagctggtgtgtgtttatccaaacatgcgcctctccggggttaccccggggcatgctgttgatttgccacatttcgtcgcgcgaagatgcaggcgtgcgcaagcgcacgaacccttcgcctaaggtgagacacgttgcatg

SEQ ID NO: 17776 - RNA, 147 nt, unidentified
  source 1..147: mol_type = other RNA; note = Related to JAEUQE010000020.1; note = Bryobacterales bacterium
tccaagtttggcgcttgccggatgacatgtctggctcagcccctctggggttaccccagggcgtattcgtaagctgatcgttcatcgcgtgagccgtcactgcgccagggcgcagatgcgcgcacgcagcgtgagactggttggatt

SEQ ID NO: 17777 - RNA, 153 nt, unidentified
  source 1..153: mol_type = other RNA; note = Related to JAEUQF010000393.1; note = Bryobacterales bacterium
tccaagcccggcaatggccgcatccgtcatcggttccgccaaagcctctttggggttaccccagggaatgtccgttacctccgcacttcgtcgcgtggacggcacctgcgccacggcgcagacaggtccacgcacagtgagtcccgttggagg

SEQ ID NO: 17778 - RNA, 152 nt, unidentified
  source 1..152: mol_type = other RNA; note = Related to JADLFK010000145.1; note = Gemmatimonadaceae bacterium
ttcaagccggttgctccgtactgctgatcacagcacggacgcgccactccggggataccccgggggtgtacaggaaagagagaattcatcgcatgcgctccgctgcagccttcacggcagtatcgcgcacgcacagtcagactcgttggagc

SEQ ID NO: 17779 - RNA, 160 nt, unidentified
  source 1..160: mol_type = other RNA; note = Related to JACMJE010000135.1; note = Phycisphaerae bacterium
tccaagccggtactccgcgggttgtgccagccgtgccgcgcgtaccaatccggggctaccccgggtgttcgtatgaagcttctatttcgtcgcaggagcggccactgcgatcgctgcgctcgcgcagttcccgctcgcgcaaggtcagattcgttggaac

SEQ ID NO: 17780 - RNA, 146 nt, unidentified
  source 1..146: mol_type = other RNA; note = Related to JAEUQC010000130.1; note = Bryobacterales bacterium
cctaagccggttgaatcacggcagttcctgcccggttgaaccactctggggtatccccagggatcttttccgatggagcatttcgtcgcgtgaccgccgctgcgccttgcgcagatatggtcacgccaggtgagactcgttgggac

SEQ ID NO: 17781 - RNA, 124 nt, Acidipila dinghuensis
  source 1..124: mol_type = other RNA; note = Related to NZ_SDMK01000004.1
tccaagccggccgcaaggtctctccggggctaccccggggcaacgtgtggaatacagcaggcaccgcatgagcctccctgcacgctgtgcagatccgctcacgcaaagtcagactcgttggagc

SEQ ID NO: 17782 - RNA, 148 nt, unidentified
  source 1..148: mol_type = other RNA; note = Related to VANK01000001.1; note = Acidobacteria bacterium AB60
tccaagctggcaagggaagaagccctcgggcctcgcccttacctctctggggttaccccagggcaacgtggcaatccgggcactcgtcgcgggagcctcgctgcgctcgcacgcagatcagctcccgccaggtcagactcgttggagc

SEQ ID NO: 17783 - RNA, 144 nt, Posidoniimonas corsicana
  source 1..144: mol_type = other RNA; note = Related to NZ_SIHJ01000001.1
accaagcttgccgaatccgcggttcgcccgcgtctcggctctctggggttaccccagggcagattgaagggttcgcgtttcagcgcgtgaggtgccatgcgcgcctacgcatcgtacctcacgcccgaccagactcgttggtgg

SEQ ID NO: 17784 - RNA, 143 nt, Posidoniimonas polymericola
  source 1..143: mol_type = other RNA; note = Related to NZ_SJPO01000016.1
ctcaagcttgctgatcgttggttcgtccgcggctcggctctctggggctaccccaggggaggttgaagggttcgacgttcgtcgcgtgaggcgccatgccctccggtgcatgattcctcacgccagaccagactcgttgggcg

SEQ ID NO: 17785 - RNA, 145 nt, Pirellulimonas nuda
  source 1..145: mol_type = other RNA; note = Related to CP036291.1
tccaagctcgttgagattggaggtccgtcttcgtctcgactctctggggttaccccagggcaatatgaagggttcgtgattcgtcgcgtgaggtgcgatgcgctgctacgcatcattcctcacgccagaccagactcgttggggc

SEQ ID NO: 17786 - RNA, 143 nt, Pirellula sp.
  source 1..143: mol_type = other RNA; note = Related to PNKX01000009.1
ttcaagccggttagcttgggccgttaaggtcgactaacctctctggggataccccaggggatcgtgaaagggttggatttcgccgcgtgagcgaagatgcgcggtgcgcatgaatgctcacgctagaccagtctcgttgagat

SEQ ID NO: 17787 - RNA, 145 nt, unidentified
  source 1..145: mol_type = other RNA; note = Related to RECD01000177.1; note = Planctomycetaceae bacterium
tccaagccggtgaggtcgagcgtgctgcgttcgattcgcctctctgaggttacctcaggggatcatgaagggctaggatttcgaggcgtgagcgtcgatgcgctaccgcgcataatagctcacgccggacaagactcgttggagt

SEQ ID NO: 17788 - RNA, 145 nt, unidentified
  source 1..145: mol_type = other RNA; note = Related to JAGQPE010001238.1; note = Planctomycetales bacterium
tccaagctggttgcgtcccgtgaactcgcggcgatgcgactctctggggttaccccagggcatgatgaagggtttcgatttcgaggcgtgagccgcgatgcgttgtcacgcatagttgctcacgcaggaccagactcgttggggc

SEQ ID NO: 17789 - RNA, 144 nt, unidentified
  source 1..144: mol_type = other RNA; note = Related to NYXM01000103.1; note = Planctomycetaceae bacterium
gtcaagccggcaaggatcggacctttgagttcgacctgtctctctggggataccccaggggatcgtgaatggttaggatttcgtcgcgtgagtcggaatgcgctccacgcatgatgactcacgctggaccagactcgttgaggt

SEQ ID NO: 17790 - RNA, 143 nt, unidentified
  source 1..143: mol_type = other RNA; note = Related to JAAYAY010000047.1; note = Planctomycetaceae bacterium
tccaagccggcaaagatcgaacctcgcgttcgtcttgcctctctggggctaccccaggggatcgtgaaacgttaggattgcgtcgcgtgagcgttgatgcgtttcacgcatagccgctcacgccggaccagactcgttgggat

SEQ ID NO: 17791 - RNA, 143 nt, Bythopirellula polymerisocia
  source 1..143: mol_type = other RNA; note = Related to SJPS01000003.1
cccaagctggttacgctcgaacttaaagttcgactaacctctctggggctaccccagggaatcgtgaatggttgaatttccggcgcgtgagctgcgacgcgttccacgcatgatagctcacgctggaccagactcgttggggt

SEQ ID NO: 17792 - RNA, 147 nt, unidentified
  source 1..147: mol_type = other RNA; note = Related to JAGQOY010000114.1; note = Planctomycetales bacterium
tccaagccggcaaaagtcgactggaaagtctactctttgtctctctggggataccccagaggatcttgaaggaattggcatttcgtcgcgtgagtaaccatgcgttgacacgcatcaacactcacgcccgaccagattcgttgggat

SEQ ID NO: 17793 - RNA, 147 nt, unidentified
  source 1..147: mol_type = other RNA; note = Related to JAGQOX010000111.1; note = Planctomycetales bacterium
ctcaagccggcaaagtgtcaccgcgaggttgacatcgttgcctctctggggttaccccaggggatcatgaaaggttcggatttcgacgcgtgagtcaggatgcgatcccacgcataacaactcacgccagaccagactcgttgaggt

SEQ ID NO: 17794 - RNA, 148 nt, unidentified
  source 1..148: mol_type = other RNA; note = Related to JAGQPK010000195.1; note = Planctomycetales bacterium
cccaagctggcggaagactggcttgaaagtcaatgcttcagcctctctggggataccccaggggatcgtgaatgactagcaattcgtcgcgtgagttcccctgcgctgacacgcagaatgactcacgccagaccggactcgttgggag

SEQ ID NO: 17795 - RNA, 147 nt, unidentified
  source 1..147: mol_type = other RNA; note = Related to JAGQQK010000642.1; note = Planctomycetaceae bacterium
actaagcgggtgctgttcctgctctgcaggtgcaaacacctcttcggggttaccccgaggaatcgtgaatggtcagtcattgacgtcgcgtgagcggagatgcgcagacacgcatgattgctcacgccgaaccagtttcgttagttt

SEQ ID NO: 17796 - RNA, 146 nt, unidentified
  source 1..146: mol_type = other RNA; note = Related to DNWZ01000023.1; note = Planctomycetaceae bacterium
cccaagctgatctgtgtcattcccatcggttctggcacgatctccctggggataccccagggcaatgaattgttcgcttttcatcgcacgagcggccttgcgcgcgacgcgcaaaatagctcgcgctaaacgtgactcgttgagac

SEQ ID NO: 17797 - RNA, 144 nt, unidentified
  source 1..144: mol_type = other RNA; note = Related to JAGQPD010000106.1; note = Planctomycetales bacterium
gtcaagcttgtttcgactagccgatgtgccggtggaaactctctggggttaccccagggaaccgtgaaggagtgacatctcgtggcgtgagcaaagatgcgagccttcgcatagccgctcacgcccaaccagactcgttgttgc

SEQ ID NO: 17798 - RNA, 147 nt, Bremerella volcania
  source 1..147: mol_type = other RNA; note = Related to CP036289.1
gttaagctgatttcctcttcatctgtttcagtgaatgaaatctctccggggataccccggagcaccctgaatggtaagcaattccatcgcttgagcaacgatgcgcctcgcgcatgatggctcaagccagactagacgcgttagcca

SEQ ID NO: 17799 - RNA, 146 nt, Blastopirellula cremea
  source 1..146: mol_type = other RNA; note = Related to QPEW01000030.1
gttaagctgatttcgatttcattttctgagtgaacgaaatctctccggggctaccccggggcatcctgaatggtaagactttccgtcgcgtgagctgcgatgcgccccacgcattactgctcacgccagactagccgcgttagcca

SEQ ID NO: 17800 - RNA, 146 nt, Blastopirellula cremea
  source 1..146: mol_type = other RNA; note = Related to NZ_QPEV01000005.1
tccaagctggccttgcttttgcttcggcttcgttaggcctctctggggttaccccaggggatcgtgaatggttagactttccgctgcgtgagtgcccgatgcccgcctaggcatgattcctcacgccgaacgagactcgttggtaa

SEQ ID NO: 17801 - RNA, 143 nt, Bremerella volcania
  source 1..143: mol_type = other RNA; note = Related to NZ_CP083740.1
gttaagctgggcttgaagaccatcgcgtcgaccaggcctctctggggttaccccaggggatcttcagtggttgtccatttcgccgcgtgagttgacctgcgtttcacgcagaacgactcacgccagaccggattcgttagcca

SEQ ID NO: 17802 - RNA, 144 nt, unidentified
  source 1..144: mol_type = other RNA; note = Related to JAGQOV010001318.1; note = Planctomycetales bacterium
cctaagctggcaaggcgacgcgatggcgttgaaccggcccctttggggttaccccaaggaatttggtagagttggacatgtcggcgcgtgagcgacgaagcgccccgcgcttcacggctcacgccagaccagactcgttaggat

SEQ ID NO: 17803 - RNA, 146 nt, Schlesneria paludicola
  source 1..146: mol_type = other RNA; note = Related to NZ_JH636435.1
cttctggtttggcaggcttcgtttacgacagccttcctgttcggggcaaccccgaaacattttgtttgacgcgttacagacctgcgcacgaacgtgcggccacgtcaatggccgtaagttcgcgcctcacgagacttggcgaagtg

SEQ ID NO: 17804 - RNA, 136 nt, unidentified
  source 1..136: mol_type = other RNA; note = Related to CP036268.1; note = Planctomycetes bacterium Pan189
cctcggctattggctcgtcacgaacgagtcgccacggggttaccccgcggcttaattcgcaacgacgcatttcggggcacgacggatgatccgctaccacggataattcgtcgcgcatcacgctgctggcgaggtg

SEQ ID NO: 17805 - RNA, 147 nt, unidentified
  source 1..147: mol_type = other RNA; note = Related to JADZEF010000070.1; note = Planctomycetaceae bacterium
tcccggtggttgcggtcggaaccttttccgtgctgcgatctccctgcggttaccgcagggaattgactgtgccctgtccttcacgtcgcgtgagcccctgtccgccttgcggacgacagctcacgcctcacgagctccggcgggaat

SEQ ID NO: 17806 - RNA, 147 nt, Rhodopirellula sp.
  source 1..147: mol_type = other RNA; note = Related to JABMPE010000532.1
attcagttgggtatggcttccacctggtgtgcaagtcctgcctctgcggggttaccccgtggatgcgattctataccgtcatttcggcgcgtgaccgggaatccagttcctggataataggtcacgcctcacgaggctggtgaatcg

SEQ ID NO: 17807 - RNA, 141 nt, unidentified
  source 1..141: mol_type = other RNA; note = Related to JAGQQF010000113.1; note = Planctomycetaceae bacterium
cttctggtggtggtgaacgacgcgttgcgacgttgaccgttccggggcaaccccggacttgtgagtttgctcccttttcaccgcgtgagccattgtccgctccacggaccaccgctcacgcacaacgggactggcgaagcc

SEQ ID NO: 17808 - RNA, 143 nt, Planctomyces sp.
  source 1..143: mol_type = other RNA; note = Related to NZ_CP011270.1
cttcggttctcgccgttcggtcgattcgatcggaaggccgctcctgggcaccccaggagcgaaggtggtgctggcagaacgtcgcgtgagcgattgtccgcggctgcggaccgtagctcacgccggacaagactggcgaagca

SEQ ID NO: 17809 - RNA, 133 nt, unidentified
  source 1..133: mol_type = other RNA; note = Related to JACKHO010000006.1; note = Planctomycetaceae bacterium
tccatgcttgtgagatttcatctcacttcgtccgaggtaacctcggagaacaaagtcagcctgatcattgcgaggtacgaacagttctccgcttcacggagtgcagttcgcacgcgaccagttgcgatggaac

SEQ ID NO: 17810 - RNA, 136 nt, Caulifigura coniformis
  source 1..136: mol_type = other RNA; note = Related to NZ_CP036271.1
cacaagcatcatgttcccttcggggaacgctgcggggttaccccgcggtcgaagcgttgccggccattcgaacgggaatcgacgcgcggtgggcccttccaccgcagcctcgattcgccacaggagtcgttgtgcg

SEQ ID NO: 17811 - RNA, 138 nt, Planctomicrobium piriforme
  source 1..138: mol_type = other RNA; note = Related to NZ_FOQD01000001.1
cttcagcgggtgattgttttcgaacgatcatcatctcggggacactccgaggactgtgacgcaaccccgcatcgattgcaggagcggccttccgcgtttgcggaaatttgctcccgccagacgaggactggtgaagac

SEQ ID NO: 17812 - RNA, 149 nt, unidentified
  source 1..149: mol_type = other RNA; note = Related to JAFBGL010000010.1; note = Verrucomicrobiaceae bacterium 5K15
gccaagattggtggaatgtgacatctccgatgtaatattccgcctctccggggtaaccccggggcacaggaaagctgagacacggcgcagccaagggctcgtcccactgccatgggagaatcccttggccgtaatggataggttggctc

SEQ ID NO: 17813 - RNA, 128 nt, Fimbriiglobus ruber
  source 1..128: mol_type = other RNA; note = Related to NZ_NIDE01000017.1
gtcaagccgtgtggcaacacactctccggggttaccccgggggatttcgttacgtgccgattccgtcgcgtgacagccgatccactatgtggataatttgtcacgccctggctgagtcaggttgacgc

SEQ ID NO: 17814 - RNA, 138 nt, Roseibacillus persicicus
  source 1..138: mol_type = other RNA; note = Related to NZ_BMXI01000009.1
tgcaagacagggagtggcgtcagccatgaccgctccggggctaccccggggactagaaaaaccgaaccgattcgaggcctcgggccttttcacggcctaccgtgaggctgcccgaggcatgaccagactggttgcagg

SEQ ID NO: 17815 - RNA, 163 nt, Rhodopirellula sp.
  source 1..163: mol_type = other RNA; note = Related to NZ_ANOH01000392.1
accaagttagacatctggtgatcactctcgaaatatcgggagaacatcggtgtcccacgcgaggatacctcgcgggaatcacttgttcagagcattgatcgcgtgagcgattatccgactgccgtcggatttgagctcacgcagcactcggaccggttggcgt

SEQ ID NO: 17816 - RNA, 164 nt, Rhodopirellula rubra
  source 1..164: mol_type = other RNA; note = Related to NZ_JACHXU010000006.1
accaagtcagacgtctttcgttcgctctcaacctgttgagaaaggcgatggatgtctcacgcgaggttacctcgtgggatagtcacatcagagcattgaaagcatgagcgagcatccgactcccgtcggataatagctcacgcaacactcggaccggttggtgc

SEQ ID NO: 17817 - RNA, 163 nt, unidentified
  source 1..163: mol_type = other RNA; note = Related to JAGQPR010000068.1; note = Planctomycetales bacterium
ttcaagacttgcttcgtatgggatcgacttggtcggtcagtgcatgcgaagtaccacgcgaggttacctcgcgggcgaaagatactctagcgatcgattacgtgagctttcatccgactaccgtcggatactggctcacgcagacacttcgacgggttgaatc

SEQ ID NO: 17818 - RNA, 158 nt, unidentified
  source 1..158: mol_type = other RNA; note = Related to SJPU01000001.1; note = Planctomycetes bacterium Poly21
accaagatcggtgttcgacggttgtgtcagcaacgtcgttgaaagcaccccacgcgaggttacctcgcgggctattttgcgctaggctttgattgcgcgagcaaccatccgtctaccgacggataacggctcgcgcctccacttggacaggttggatt

SEQ ID NO: 17819 - RNA, 157 nt, unidentified
  source 1..157: mol_type = other RNA; note = Related to JADYZV010000153.1; note = Pirellulaceae bacterium
accaagttcgacgtttgcgtaacggcgttttcgcagttgccaaatgttctgcgcgaggttacctcgcgcaatttacttagccaggcactgattgcacgagcaaccttgcgtctaccgacgcaatatggctcgtgcccacactcggaccggttgggaa

SEQ ID NO: 17820 - RNA, 153 nt, unidentified
  source 1..153: mol_type = other RNA; note = Related to CP036526.1; note = Planctomycetes bacterium K23_9
accaagttgattggtagccggatcgattgatacgactgccatttgccgcgaggttacctcgtggtagttgccttacttagcaagttgaccacgcgagcttggctgcgtctgccgacgcagggaagctcgcgcaggacgtggacgagttggcgc

SEQ ID NO: 17821 - RNA, 141 nt, unidentified
  source 1..141: mol_type = other RNA; note = Related to JABDKS010000522.1; note = Pirellulaceae bacterium
acttagctgcacgctgtcgattgtgcgctgatggccacgaggttacctcgtggcagtgacacgactgagcgattgaccgcacgagcttgcctgcgtctaccgacgcagcgaggctcgcgcgagacgcggaccggttggctc

SEQ ID NO: 17822 - RNA, 135 nt, unidentified
  source 1..135: mol_type = other RNA; note = Related to JAGQOZ010000019.1; note = Planctomycetales bacterium
tccaagctgacggagcgtttgccttcgtctccctggggatactccagggtaagatactaactctgatttcatgggcaggtttcctccgcgttgccacgcggaattgacctgcgccagacacggactcgttgggct

SEQ ID NO: 17823 - RNA, 166 nt, unidentified
  source 1..166: mol_type = other RNA; note = Related to JAEUHH010000058.1; note = Verrucomicrobiales bacterium
tccaagctggtgaatctccgtctgcgaacccgtcagggagcgcaggcggcgtcacctttccggggcatccccggggatacgacactccgacccaccgccgcgcgcggcccaaagggcgacaggcctgccgcccgcccggccgcgccggacagggacacgttggggc

SEQ ID NO: 17824 - RNA, 148 nt, unidentified
  source 1..148: mol_type = other RNA; note = Related to VFZW01000070.1; note = Acidobacteria bacterium
tccaagcttggttgaatcggactttcgcaagttcgtttcttccgctccggggataccccggggaccctcgtgggacttagcattcgtcgcgtgagcttcggcgcgtgaggtcgcgcgaacgctcacgctgggctggactcgttggggc

SEQ ID NO: 17825 - RNA, 129 nt, unidentified
  source 1..129: mol_type = other RNA; note = Related to JAGQPM010000203.1; note = Planctomycetales bacterium
cttaagtttgatgaaccttgttcatctctctggggttaccccaggggatcgcgaaggtacgacaacacgaatgtgagcgtcgatgcgtttcacgcatgattgctcacgaaagtcgagactggttaaggc

SEQ ID NO: 17826 - RNA, 145 nt, unidentified
  source 1..145: mol_type = other RNA; note = Related to JAGQPF010000096.1; note = Planctomycetales bacterium
tccaagctcggtgaagtagtgtgtttacgctgcttccctcactgggggtaccccagtgcaacttgaacaacttgccatttcagatgcgagcccgagaaatgcgcttcacgcatgactagctcgcgttgtcaggactcgttggacc

SEQ ID NO: 17827 - RNA, 139 nt, Mariniblastus fucicola
  source 1..139: mol_type = other RNA; note = Related to CP042912.1
ttcaagctggatgtttcatttcgaaagatcctctgcggggttaccccgtggtttaactggacgttgcaaacgcgtttgcgtgaaagaccgggcgcctaccgacgcccctgatttcactgctggcatgacacgttgaatc

SEQ ID NO: 17828 - RNA, 151 nt, unidentified
  source 1..151: mol_type = other RNA; note = Related to JACRUV010000555.1; note = Planctomycetes bacterium
tccaagatggcaagacctctgaccgtttgcgtcagtgttttgtctctctggggataccccagggcaatgacttgacgatggacatttcgccgcgtgagccggactgcgcggaaacgcagaacagctcacgcacaacgagacgggttggaga

SEQ ID NO: 17829 - RNA, 151 nt, unidentified
  source 1..151: mol_type = other RNA; note = Related to VGYH01000867.1; note = Planctomycetes bacterium
tccaagctggtaagacgccgttccaacgacgggtccgttttgcctctctggggaaaccccaggggatccatttgaccttcacaactgcgccgcatgagcaaccgtgcgcggacgcgcacaaaggctcatgcatgacgagactggttggaga

SEQ ID NO: 17830 - RNA, 146 nt, Planctomyces sp.
  source 1..146: mol_type = other RNA; note = Related to JAEUIH010000118.1
ttcaggctggcgaaacgttgccttataacaacggcttcgtctctccggggtatccccggggcaatatcttctctgtggcactgcatcgcgtgagggcaagtacgttccacgtacgattcctcacgcgaatcccgtctcgctgaacg

SEQ ID NO: 17831 - RNA, 145 nt, unidentified
  source 1..145: mol_type = other RNA; note = Related to JAGQQS010000555.1; note = Planctomycetaceae bacterium
ttcaggctggcgaatcgttgttttaaataacgacttcgtctctctggggcatccccgggggaataactgctctttggcactgcgtcgcgtgaggggtagtacgctccacgtacatttcctcacgccaatctggtttcgctgaatc

SEQ ID NO: 17832 - RNA, 142 nt, unidentified
  source 1..142: mol_type = other RNA; note = Related to JAEUHE010000137.1; note = Verrucomicrobiales bacterium
tccaagctgatgaagcggacctcggtcggccttcatctctccggggttaccccgggggaacttgtcagtagctcgtttcatcgcgagagccacgctgcgctggcgcgcagatccgctcacgcacaacgggacgcgttggagc

SEQ ID NO: 17833 - RNA, 139 nt, unidentified
  source 1..139: mol_type = other RNA; note = Related to JACPRJ010000368.1; note = Verrucomicrobia bacterium
tccaagccggtgaagttggcttgccatgcttcgcctctccggggttaccccgggggaacgcgacagtgacccgtctcatagcgagagcgtagctacgctgcgcgtaggaccgctcacgcacgacacgacgagttggagc

SEQ ID NO: 17834 - RNA, 149 nt, Aquisphaera giovannonii
  source 1..149: mol_type = other RNA; note = Related to NZ_CP042997.1
tccaagcgggcggatgggtcgtcgcgaggcggcctcttcgtcgctccggggttaccccgcgagacgttggtgacgcaggcaattcggcgcgtgaggtccactacgcctccgtcgtaggtcccctcacgccggacgagtctggttggagc

SEQ ID NO: 17835 - RNA, 149 nt, Aquisphaera sp.
  source 1..149: mol_type = other RNA; note = Related to NZ_JAALJH010000014.1
tccaagcgggcggatggatcgtcgcgaggcggtctcttcgtcgctccggggttaccccgcgagacgttggtgagttgggcatttcggcgcgtgaggccagctacgcctccgtcgtagagcacctcacgccggacgagactggttggagc

SEQ ID NO: 17836 - RNA, 147 nt, Singulisphaera acidiphila
  source 1..147: mol_type = other RNA; note = Related to CP003364.1
cccaagcgggtgaaaccactgtcttcggatggtgggtctcacctctccggggctaccccgggggagcatcttccacggagatcgcagcgcgtgagcggccctacgcttcgcgtagaaatgctcacgcccgacgagactggttggggc

SEQ ID NO: 17837 - RNA, 139 nt, unidentified
  source 1..139: mol_type = other RNA; note = Related to JACKIC010000007.1; note = Planctomycetes bacterium
cccgggcccgggaagccaccctcgtggtgaccttctctctccggggataccccggggcatacccgcatcgccattccgctgcacggagcttcgcggcgccgcgcgccggtgggtccgcgctggaccgacacgccggggc

SEQ ID NO: 17838 - RNA, 151 nt, unidentified
  source 1..151: mol_type = other RNA; note = Related to JAFEGM010000060.1; note = Verrucomicrobia bacterium
tccgggccgaagaagcgaacgtctcctccgaggcgtgcgcctccttctctccggggctaccccgggggatatccgcattgcaaatccaccgcgcggaaggcgatgcgcctgcgtcgcatgagtttccgcgccggacccgcgtcgccggagc

SEQ ID NO: 17839 - RNA, 139 nt, unidentified
  source 1..139: mol_type = other RNA; note = Related to JAGQQE010000253.1; note = Planctomycetaceae bacterium
ctgatgcattttctgcccccaacgttgcctgaccgatcatttctccggggttaccccggggcattttcagcactcgaatttcgtcgcgtgagccatagtacgccggtcgtacaactgctcacgcctgtcaggttcagcc

SEQ ID NO: 17840 - RNA, 142 nt, unidentified
  source 1..142: mol_type = other RNA; note = Related to JAGQPY010000402.1; note = Planctomycetaceae bacterium
atcaggctgatggacggcgttcatgacgtacgattcatctctccggggctaccccggggcatattcctaaccgcgatttcgtaacgtgaggcacggtacgctgcgcgtacgattcctcacgatgctcgagtttcgctgagag

SEQ ID NO: 17841 - RNA, 135 nt, Luteolibacter pohnpeiensis
  source 1..135: mol_type = other RNA; note = Related to NZ_JAENIJ010000042.1
ctcaagccggtcgtatgattcatcagcgacctctccggggttaccccgggggatcaaaagccaaaccattgcgaggcgagggcctcatcacgctagcacgtgaatatgcccacgccagacgggacacgttgaggg

SEQ ID NO: 17842 - RNA, 136 nt, unidentified
  source 1..136: mol_type = other RNA; note = Related to NEUO01000019.1; note = Verrucomicrobiae bacterium Tous-C4TDCM
gccaagccggtcgtgtggccaccatgcgacctctccggggctaccccgggggatcgacactccgaagcatcacgaggcgagggcccaatcacgctgccgcgtgagaccgcccgcgccagacaggacgcgttggcgc

SEQ ID NO: 17843 - RNA, 139 nt, unidentified
  source 1..139: mol_type = other RNA; note = Related to JAFLEF010000009.1; note = Verrucomicrobia bacterium
tccaagccggcaatgccgacctgttcgtcgttgcctctccggggttaccccgggggatctcgttaatgcctcgtcccagcgcgcgagcgtaattccgcttcacggaaatctgctcccgcccgactcgtcgcgttggagc

SEQ ID NO: 17844 - RNA, 144 nt, unidentified
  source 1..144: mol_type = other RNA; note = Related to JAHWKS010000775.1; note = Planctomycetes bacterium
tccaagccggcgttgcgtcgcatgtcgatcgccaccgtctctccgaggcttcctcgggggagttttctaccgaccgctttgcggtgcgtgagaagccttgcgccgtgcgcaaaatgtctcacgcctgactcgatgcgttggagc

SEQ ID NO: 17845 - RNA, 144 nt, unidentified
  source 1..144: mol_type = other RNA; note = Related to JABGQM010000001.1; note = Verrucomicrobia bacterium
ctcgagtttgataatgcttcgacgtgtttggagtattgtctctccggggttaccccggggtatcacgacagagagccacttcatggcacgagccttactgcaccttgtgcagctccgctcgcgcttcacaggacgggtcgagtg

SEQ ID NO: 17846 - RNA, 144 nt, Burkholderia ambifaria
  source 1..144: mol_type = other RNA; note = Related to CP000442.1
gtcaagcacacccccggaacaggcagccgatgttccaggaccacggggctaccccgtggatgagaccgacactccgatgcgtcgcaagagcgcaggttgcgcgttgcgcaacgactgctctcgcagcacctgtcacgttgactc

SEQ ID NO: 17847 - RNA, 144 nt, Burkholderia ambifaria
  source 1..144: mol_type = other RNA; note = Related to NZ_CP086299.1
gtcaagcacacccccggagcaggcagccgatgttccaggaccacggggctaccccgtggatgagaccgacactccgatgcgtcgcaagagcgcaggttgcgcgttgcgcaacgactgctctcgcagcacctgtcacgttgactc

SEQ ID NO: 17848 - RNA, 144 nt, Burkholderia anthina
  source 1..144: mol_type = other RNA; note = Related to CABVLY010000011.1
gtcaagcacacccccggaacaggcagccgatgttccaggactacggggctaccccgtggatgagatcgacacgccgatgcgtcgcaagagcgcaatttgcgcgttgcgcaaagactgctctcgcagcacctgtcacgttgactc

SEQ ID NO: 17849 - RNA, 144 nt, Burkholderia seminalis
  source 1..144: mol_type = other RNA; note = Related to CP013399.1
gtcaagcacacacccggaacaggcagtcgatgttccaggaccacggggctaccccgtggatcggatcgacacaccgatgcgtcgcaaggggcccggttgcgcgcggcgcaacgcctcccctcgcagcaccagccacgttgactc

SEQ ID NO: 17850 - RNA, 144 nt, Burkholderia cenocepacia
  source 1..144: mol_type = other RNA; note = Related to CP015035.1
gtcaagcacacgcccggaacaggcagccgatgttccaggactacggggctaccccgtggatcagatcgatacgccgatgcgtcgcaagtgcgcaagttgcgcgttgcgcaacgaccgctctcgcagcaccagccacgttggctc

SEQ ID NO: 17851 - RNA, 144 nt, Burkholderia cepacia
  source 1..144: mol_type = other RNA; note = Related to CP011301.1
gtcaagcacacgcccggaacaggcagtcgatgttccaggactacggggctaccccgtggatgagaccgacaccccgatgcgtcgcaagagcgcaggttgcgcgttgcgcaacgactgctctcgcagcacccgtcacgttgactc

SEQ ID NO: 17852 - RNA, 144 nt, Burkholderia pseudomultivorans
  source 1..144: mol_type = other RNA; note = Related to NZ_CADFDQ010000020.1
gtcaagcacactcccggagcaggcagtcgatgttccaggactacggggctaccccgtggatcagaccgacaccccgatgcgtcgcaagagcgtgagctgcgcgttgcgcagcgcgagctctcgcaggacctgtcacgttgactc

SEQ ID NO: 17853 - RNA, 142 nt, Burkholderia sp.
  source 1..142: mol_type = other RNA; note = Related to JAAGPL010000085.1
gtcaagcacaccccaggagcaggcaatcgatgttcccggactacggggctaccccgtggatgagatcgactccccgatgcgtcgcaagagcccgattgcgcgttgcgcaaagcagctctcgcagcaccgcgcacgttgactc

SEQ ID NO: 17854 - RNA, 142 nt, Paraburkholderia flava
  source 1..142: mol_type = other RNA; note = Related to NZ_SMRO01000001.1
gtcaagcacacgccgggaacaggcagccgatgttccaggactacggggctaccccgtggatgaggtcgactcaccgatgcatcgcaagagccggactgcgcgctgcgcagggcggctctcgcagcaccaggcacgttgactc

SEQ ID NO: 17855 - RNA, 141 nt, Burkholderia guangdongensis
  source 1..141: mol_type = other RNA; note = Related to NZ_JACBNX010000003.1
gtcaagcacaccccggaacaggcaaccgatgttcccggactacggggctaccccgtggatgagatcgactccccgatgcgtcgcaagagcccggttgcgcgttgcgcaaagccgctctcgcagcaccgagcacgttggctc

SEQ ID NO: 17856 - RNA, 143 nt, Burkholderia ubonensis
  source 1..143: mol_type = other RNA; note = Related to CP013414.1
gtcaagcacacccccggagcaggcagcgcatgttccaggactacggggctaccccgtggatgagatcgactccccgatgcgtcgcaagagccgcgattgcgcgttgcgcaagacagctctcgcagcaccaggcacgttgactc

SEQ ID NO: 17857 - RNA, 140 nt, Burkholderia sp.
  source 1..140: mol_type = other RNA; note = Related to VWWJ01000001.1
gtcaagcacgacccgggatcaggcagcacgctcccggacggcggggctaccccgccgatgactcgcaagtcgcaatacatcgcaagagcggcgttgcgctgacgcgcaaatgagctctcgccagactggcacgttgatcc

SEQ ID NO: 17858 - RNA, 139 nt, Paraburkholderia acidisoli
  source 1..139: mol_type = other RNA; note = Related to NZ_CP046915.1
gtcaagcatgacccgggagcacgcagtgcgttccggacggcggggttaccccgccgatgactcgcaagccgtactacatcgccagcgccacgttgcgcatgcgcgcaagaacgcgctagccagactggcacgttgactc

SEQ ID NO: 17859 - RNA, 137 nt, Burkholderia sp.
  source 1..137: mol_type = other RNA; note = Related to LMPF01000021.1
gtcaagcacataacgggagaatcagtgcatcccgacggtggggttaccccgccgatgactcgtaagtcgcaatacatcgcaagagcggccttgcgcatgcgcgcaacttggctctagccagactggcacgttgattc

SEQ ID NO: 17860 - RNA, 141 nt, Burkholderia sp.
  source 1..141: mol_type = other RNA; note = Related to JAAGPF010000151.1
gccaagcggacctcgggagcacgcttgatcgtttcccgaacgacggggttaccccgtcgttgcaacgcacatggcaatacgtcgcaggagccttgctgcgcttcgcgcagggcagctccagccagaccggcacgttgactc

SEQ ID NO: 17861 - RNA, 142 nt, Paraburkholderia acidicola
  source 1..142: mol_type = other RNA; note = Related to NZ_MTZV01000006.1
gtcaagcacaccccgggagcaggcaaccgatgttcctggactacggggttaccccgtggctgatttccagtttgcattacgtcgcaagagccagcgttgcgcgctgcgcaagatagctctcgcagaactagcgcgttgattc

SEQ ID NO: 17862 - RNA, 141 nt, Robbsia andropogonis
  source 1..141: mol_type = other RNA; note = Related to NZ_CADFGU010000011.1
atcaagcttattcctcgggcgctgtcattttggcccaggaccacggggctaccccgtggatgatttggatgtcgcattgcaccgcaagagccccgttgcgcacggcgcaagcccgctctcgccacaccggtacgttgattc

SEQ ID NO: 17863 - RNA, 144 nt, Paraburkholderia phenazinium
  source 1..144: mol_type = other RNA; note = Related to FNCJ01000001.1
gtcaagcttgccaaggaccgggcagtcaacgttccaggcactacggggctaccccgtggatcagcatgatctccgcagttcgtcgcatgagcccgctttgcgtgctacgcaagaccgctcacgcagcactagacgcgttgactc

SEQ ID NO: 17864 - RNA, 144 nt, Paraburkholderia sp.
  source 1..144: mol_type = other RNA; note = Related to QVQV01000003.1
gtcaagcttgccggggtacgggaaggatacgttccaggcactacggggttaccccgtggatcagcatgatctccgcagttcgtcgcatgagccttctccacgccttgcgtagctgggctcacgcagcaccagtcgcgttgactc

SEQ ID NO: 17865 - RNA, 143 nt, Paraburkholderia dipogonis
  source 1..143: mol_type = other RNA; note = Related to NZ_SNVI01000001.1
gtcaagcacgcctggatgctggccacataggttccgggcaccacggggctaccccgtggatcaacactactccgcagttcgtcgcatgagcctcagttgcgtcttacgcaagagcgctcacgcagcacaagacgcgttgactg

SEQ ID NO: 17866 - RNA, 143 nt, Burkholderia sp.
  source 1..143: mol_type = other RNA; note = Related to FNTG01000001.1
gtcaagcacccctcgaggcaagcgacatcggttccgggcaccacgaggctaccccgtggatcaacactactccgcagttcgtcgcgtgagcctcagttgcgtgttacgcaagagcgctcacgcagcacaagacgcgttgactg

SEQ ID NO: 17867 - RNA, 144 nt, Paraburkholderia bryophila
  source 1..144: mol_type = other RNA; note = Related to NZ_QLTK01000012.1
gtcaagcacgcctgagttcgggcagcatacgttccgggcactacggggctaccccgtggattagcatgacctccgcacttcgtcgcatgagcgtcacttgcgctgtgcgcaacacggctcacgcagcacaagaagcgttgactg

SEQ ID NO: 17868 - RNA, 145 nt, Paraburkholderia terricola
  source 1..145: mol_type = other RNA; note = Related to NZ_CP024941.1
gtcaagcttgccccggttcgggccgcatacgttccgggcactacggggctaccccgtggatcagaatgacctccgcagttcgtcgcatgagcccgttgttgcgcgttgcgcaaatacgctcacgcagcacaagacgcgttgactg

SEQ ID NO: 17869 - RNA, 144 nt, Paraburkholderia fungorum
  source 1..144: mol_type = other RNA; note = Related to CP010026.1
gtcaagcttgccagggtacaggcagtattcgttccgggcactacggggctaccccgtggattagaaagacctccgcagttcgtcgcatgagcgtgacttgcgcattgcgcaaacgagctcacgcagcacaagacgcgttgactg

SEQ ID NO: 17870 - RNA, 144 nt, Paraburkholderia kirstenboschensis
  source 1..144: mol_type = other RNA; note = Related to NZ_CAJHCR010000004.1
gtcaagcttgctcaggtgcgggcagcttacgttccgggcactacggggttaccccgtggatatgaatgacctccgcagttcgtcgcatgagcctgatttgcgcgttgcgcaatgcagctcacgcagcacaagacgcgttgactg

SEQ ID NO: 17871 - RNA, 152 nt, Gemmata sp.
  source 1..152: mol_type = other RNA; note = Related to NZ_JAGKQQ010000001.1
gccgagcacgatggcaacatggttcgcgagaaccgtgtccgccatcgctccggggttaccccggagaccttttatcacttgggactgcaggcgcgcgacagcccgggcgcttccacgcccccgatgtcgcgcgggacgggactcgtcgaccc

SEQ ID NO: 17872 - RNA, 152 nt, Gemmata sp.
  source 1..152: mol_type = other RNA; note = Related to NZ_LR593886.1
gccgagcacggtggccgagatggttcgtaagagcccaatttgccatcgctccggggttaccccggggctttccacaacctggtactgcaagcgcgcgacagcttgggcgcttccacgcccgtcttgtcgcgcgagacaagactcgtcggccc

SEQ ID NO: 17873 - RNA, 149 nt, unidentified
  source 1..149: mol_type = other RNA; note = Related to VGZJ01000033.1; note = Planctomycetes bacterium
gccgagcacggcgggacgcgggttcgctgaaccggccgaacgccactccggggttaccccggggtgcgcccaacacgtgacagacgagcgcgcgacgaactgggcgcttccacgcccgccccgtcgcgccggccgagactcgtcggccc

SEQ ID NO: 17874 - RNA, 151 nt, Isosphaera sp.
  source 1..151: mol_type = other RNA; note = Related to PNKH01000003.1
cccgagcacgccgccgtcgtgtccgcaggggcgcaacgggccggcacgccggggttaccccggtggtcgcacaccacctgtcccagccagcgcgcgacagactgggcactaccgtgcccgccgtgtcgcgccggacgagactcgtcgggcc

SEQ ID NO: 17875 - RNA, 150 nt, unidentified
  source 1..150: mol_type = other RNA; note = Related to JAFKFQ010000274.1; note = unidentified bacterium
cccgagtctcgtcgtccgttggtccgcaagaatcgacggccggcacgccggggttaccccggcgcaggttcgtaacccgagtcggttggcgcgcgacggcgggggcactcccatgcccgtcccgtcgcgccggacaggaccggtcgggtc

SEQ ID NO: 17876 - RNA, 150 nt, unidentified
  source 1..150: mol_type = other RNA; note = Related to JAIEQO010001050.1; note = Gemmataceae bacterium
cccaagcccggcaggcgctccgcccgcgagggcggggcggttgctgccccggggataccccgggggcctttcctcacttgagccgctcggcgcgcgacggcgggggcgctccacgcccgacccgtcgcgccggaccggactcgttggggc

SEQ ID NO: 17877 - RNA, 150 nt, unidentified
  source 1..150: mol_type = other RNA; note = Related to JAFATI010001257.1; note = Planctomycetes bacterium
ctcaagacgacgataccgttgttgcctcaacagcggttagggtctcttcggggctaccccgggggagcggtttcgttaccacaggacgccgcgcgaccttccctgcgctaccacgcagcccaggtcgcgcttcacgagttaggttgggac

SEQ ID NO: 17878 - RNA, 143 nt, unidentified
  source 1..143: mol_type = other RNA; note = Related to JACPPF010000025.1; note = Planctomycetes bacterium
ttcaagaagacgccaggctgtttcggcagcgtgggtgtctgtgcggggctaccccgcgcgtgcgacaatcccgagcgttccagcgcgcggcctcggcctgcgcttcacgcagataaggccgcgcgagacgagaaggttgaatg

SEQ ID NO: 17879 - RNA, 137 nt, Sandaracinus amylolyticus
  source 1..137: mol_type = other RNA; note = Related to NZ_CP011125.1
gtcgagccgatcgaggcgcacgcctcggtctccgcgaggcttcctcgcggacgcttcgtacctccagcatcgacgtcgcacgtgccccggctgcggaaccgcagcgaccgcacgcgcaggaccggaatcgtcgacgc

SEQ ID NO: 17880 - RNA, 146 nt, unidentified
  source 1..146: mol_type = other RNA; note = Related to JACPFM010000079.1; note = Deltaproteobacteria bacterium
accaagacggtggcgagtggtcttcggatcgcgcgccgcctctccggggcaaccccgggggtgctccttcagccacgcagggcaacgcgtgacccacgctgcgcgctggcgcaggactggtcacgcacgacgagatcggttggccg

SEQ ID NO: 17881 - RNA, 140 nt, unidentified
  source 1..140: mol_type = other RNA; note = Related to JABFXX010000467.1; note = Kofleriaceae bacterium
accaagcaggtgatcggccactggttggtcacctctccgcggtaaccgcggggatgctgtacgagtacgagagtgcgatgcacgcgatcgggctgcgcgaaacgcaggtcctcgcgtggcgagacgagactggttggtac

SEQ ID NO: 17882 - RNA, 127 nt, unidentified
  source 1..127: mol_type = other RNA; note = Related to JADJMO010000033.1; note = Myxococcales bacterium
accaagcaggcggactccgcctctccggggcaaccccggggacgatccatcaccgaacacggccacggcccgacgggcggcgcgcggttgcgcgcgattcgtcgcgcaggacgagcaccgttggtct

SEQ ID NO: 17883 - RNA, 126 nt, unidentified
  source 1..126: mol_type = other RNA; note = Related to JAGQJB010000072.1; note = Myxococcales bacterium
tccgagccggtgatcgctcaccgcttcggggctaccccgagggcacttcgtcaggtaccgatccagcgcccggcccgggctgcgcgatacgcagggctggccgggccagaccagtcacgtcggagc

SEQ ID NO: 17884 - RNA, 148 nt, unidentified
  source 1..148: mol_type = other RNA; note = Related to JADJOY010000023.1; note = Deltaproteobacteria bacterium
ctcgagccggtagccagcgctttcgagcacgaggcgcctccgcggggataccccgcgggaagattcacagctgaccattccatcgcacggaggtccgtgcgcgccctggcgcgcactcgtctccgcgcaccacgggcctcgtcgaggg

SEQ ID NO: 17885 - RNA, 144 nt, Labilithrix sp.
  source 1..144: mol_type = other RNA; note = Related to JAHBWB010000013.1
tccaagccggcaacggttcgcctcgcgcggacctcagcctctccgaggttacctcgggggacgttcgtaagtgtggttctcagcgcgtgagacacggggcgccaggacgcccgacctctcccgcatcacgggtctcgttggagc

SEQ ID NO: 17886 - RNA, 145 nt, unidentified
  source 1..145: mol_type = other RNA; note = Related to MKVQ01000030.1; note = Myxococcales bacterium 68-20
ttcaagccggcatggccttcgcctcgcgcgaagctctgcctctccgaggctacctcgggggatgttcgtgagtatggctctcagcgcaagacgcgcggggcgccaagacgcccgacacgtcgtgcaacacgggtctcgttggagt

SEQ ID NO: 17887 - RNA, 132 nt, unidentified
  source 1..132: mol_type = other RNA; note = Related to JABFRG010000265.1; note = Polyangiaceae bacterium
ttcggggcgagcgcggtgccgagccgcttcggggtgaaccccgaggacgacgacgtggatacacagcgcatcgcgcgagggagagtgcggacgaccgcacgacctctcgcgccggacgagaccggttgatgc

SEQ ID NO: 17888 - RNA, 154 nt, Labilithrix sp.
  source 1..154: mol_type = other RNA; note = Related to JAHBWD010000001.1
gtcgagtgggaagagcgcttctccgatctcggatcggtaggcgcgaatcctcgccggggttaccccggcgcacgcgtacgatcgagcattgcagcgcatgaggcacggtccgccagacggacgacccctcacgcaagacgagacaggtcgacgc

SEQ ID NO: 17889 - RNA, 146 nt, unidentified
  source 1..146: mol_type = other RNA; note = Related to JAGQIZ010000167.1; note = Myxococcales bacterium
cccgagcccttgggctcatccctcgtggattgggctgtcgctctccggggttaccccggggaaacgtcatgactttggcattcgtctcgcgaggaacggcccgcgttcacgggcgacccctcgctagggaccagacacgtcgagcg

SEQ ID NO: 17890 - RNA, 140 nt, unidentified
  source 1..140: mol_type = other RNA; note = Related to JACQYO010000099.1; note = Deltaproteobacteria bacterium
tccgagcttgcggtgcgggtctacgcatcggctctccggggctaccccggggaattcttgagactaggcaactcagcgcgcgagcttcgctgcatccctaatgcaggactgctcgcgcctcgacgagatcacgtcggggc

SEQ ID NO: 17891 - RNA, 127 nt, unidentified
  source 1..127: mol_type = other RNA; note = Related to BJHF01000062.1; note = Deltaproteobacteria bacterium
gccgagccggtgagcttcaccactccggggaaaccccggggatccctcgttaccttgggcacccgtcgcaggaccctgagtgcgcattcacgcacgtctggtcctgcccgacggggcgcgtcgggcg

SEQ ID NO: 17892 - RNA, 146 nt, unidentified
  source 1..146: mol_type = other RNA; note = Related to JADZFZ010000151.1; note = Deltaproteobacteria bacterium
cccgagcaggtgttcgttcgccggagacggcgagcgcacctcttcggggtcaccccgaggacacgaccacggcagaaggctccatcgcacgagcggagccgcgccacgacgcggagctgctcgcgcttcacgagaatcgtcgggac

SEQ ID NO: 17893 - RNA, 147 nt, Corallococcus interemptor
  source 1..147: mol_type = other RNA; note = Related to NZ_RAWM01000011.1
acccagcaggtagacggtccgtggcgacacggtcccctgcctctccggggtacccccggggattcttcaagcggagcacttccccacgcatggccgacctcgcggcaagccgcgacgctggccacgccagacgggacaggtgggacc

SEQ ID NO: 17894 - RNA, 147 nt, Corallococcus sp.
  source 1..147: mol_type = other RNA; note = Related to NZ_CP079946.1
acccagcaggtagcaggtccgtggagacacggtcccctgcctctccggggtacccccggggaatccatacacggagcacttccccacgcgtggccgaccccgcggcaagccgcgaccctggccacgccagacgggacaggtgggacc

SEQ ID NO: 17895 - RNA, 147 nt, Myxococcus sp.
  source 1..147: mol_type = other RNA; note = Related to NZ_VIFM01000112.1
acccagcgggtagacggtccgtggtgacacggtccgctgcctctccggggtacccccggggaatgatttcgaggagcacagccccacgcgaggccgggactgcggcgagccgcagtgcgggccacgccagacgggacaggtgggtcc

SEQ ID NO: 17896 - RNA, 147 nt, Myxococcus sp.
  source 1..147: mol_type = other RNA; note = Related to NZ_CP071091.1
acccagcgcgtagacggaccgtggagacacggcccgctacttctccggggtacccccggggagtcttctcgaggagcacatccccacgcgaggccgggtccgcggcaagccgcgactcgggccacgccagacggggcaggtgggcgc

SEQ ID NO: 17897 - RNA, 147 nt, Myxococcus fulvus
  source 1..147: mol_type = other RNA; note = Related to NZ_FOIB01000009.1
acccagcgcgtagacggtccgtggtgacacggccttctgcttctccggggtacccccggggagtcgtcatgaggaacacactcccacgcgaggccggtatcgcggcgagccgcgactctggccacgccagacgggacaggtgggccc

SEQ ID NO: 17898 - RNA, 146 nt, Pyxidicoccus sp.
  source 1..146: mol_type = other RNA; note = Related to NZ_JAAIYA010000009.1
ctcaaggggtgacgcagtcgtcttcgggcggcgcgttccctctccggggctaccccggggatgccgtgggacgtcggacttcacagcacatgcccggtagtgcgcgttgcgcaccgcggggcacgtaggacaggacaggatggggc

SEQ ID NO: 17899 - RNA, 148 nt, unidentified
  source 1..148: mol_type = other RNA; note = Related to JADYYK010000281.1; note = Deltaproteobacteria bacterium
cgcgagctggggaggtcgccatcgcgagatggagaccgaacctctccggggttcccccggggcaacttcgcggacagggcaagacggcgcgtgaccctcgctgcgcttcacgcagatccggtcgacgcaggacgagatcggtcgcgag

SEQ ID NO: 17900 - RNA, 132 nt, unidentified
  source 1..132: mol_type = other RNA; note = Related to DOEP01000754.1; note = Planctomycetes bacterium
ctcgagttcgctcggaacgatccgggactctggggttaccccaggggcagagtgttgactcaagaacgccaactcacgacggcccgtgcgcttgcacgcaccggtcgtcgcgtggggtgagacggtcggggc

SEQ ID NO: 17901 - RNA, 139 nt, unidentified
  source 1..139: mol_type = other RNA; note = Related to JAHBXY010000029.1; note = Planctomycetes bacterium
cccaagacggtccgtggtcctcggacgacggacgctccggggataccccggggcctgaccatgacgaacacgtgtcgacgcatggcctccggtgcgacgggtcgcacgaccggccacgccggacgcgacaggttggggc

SEQ ID NO: 17902 - RNA, 144 nt, Pseudoduganella sp.
  source 1..144: mol_type = other RNA; note = Related to JAJTCO010000005.1
ttcaagccggcctgtcttttgcctcgcgcagggacagcctctacggggctaccccgtgggatgctttttgttccgcacttcgccgcatgagcggcattgcgctggcgcgcaaccatgctcacgcatcacgagactcgttgaagg

SEQ ID NO: 17903 - RNA, 144 nt, Massilia sp.
  source 1..144: mol_type = other RNA; note = Related to NZ_LMDJ01000008.1
ttcaagccggcctgtccctgcttcgtgcagggacagcctctacggggctaccccgtggtaacttgattggttcagcatttcgccgcatgggcctggttgcgctttcgcgcaaagccgctcacgcatcacgagactcgttgaagg

SEQ ID NO: 17904 - RNA, 143 nt, Massilia sp.
  source 1..143: mol_type = other RNA; note = Related to NZ_CP086370.1
ttcaagccggcctgtcactgcctcgtgcagggacagcctctacggggctaccccgtgggacattgattgttcagtacttcgccgcctgggccgcgttgcgcttccgcgcaagacagcccacgcatcacgagactcgttgaagg

SEQ ID NO: 17905 - RNA, 142 nt, Pseudoduganella violaceinigra
  source 1..142: mol_type = other RNA; note = Related to NZ_AUDI01000016.1
ttcaagccggcctgtccttgcctcgcgcagtgacagcctctacggggctaccccgtgggatattttttgctcagcatttcgccgcatgagagtccttgcgctccgcgcaacgaaactcaagcatcacgagactcgttgaagg

SEQ ID NO: 17906 - RNA, 142 nt, Massilia eburnea
  source 1..142: mol_type = other RNA; note = Related to NZ_WNKX01000014.1
ttcaagccggcctgtccctgccgcgtgcagggcacgcctctgcggggctaccccgtgggatgttgattgatctgcatttcgccgcatgagcgccattgcgttccacgcaaacatgctcacgcatcacgagactcgttgaagg

SEQ ID NO: 17907 - RNA, 142 nt, Duganella sp.
  source 1..142: mol_type = other RNA; note = Related to LMDB01000012.1
gccaagccggcctgtctttgcttcgtgcagggacagcctctgcggggttaccccgcgggatgtttgatgttctgcatttcgccgcatgagtggcattgcgcttcgcgcaaccatacgcacgcttcacgagactcgttggcgg

SEQ ID NO: 17908 - RNA, 143 nt, Duganella sp.
  source 1..143: mol_type = other RNA; note = Related to CP051684.1
ttcaagccggcctgttcttgccgcgtgcaggaacagcctctgcggggttaccccgtgggatatttattgttcagcacttcaccgcctgagccccgttgcgctagcgcgcaagatagctcacgcatcacgagactcgttgaagg

SEQ ID NO: 17909 - RNA, 143 nt, Duganella alba
  source 1..143: mol_type = other RNA; note = Related to NZ_WKJN01000036.1
ttcaagccggcctgttcttgccgcgtgcagggacagcctctgcggggctaccccgtgggatattgattgttcagcacttcgccgcctgagccgcgttgcgctcccgcgcaagacagctcacgcatcacgagactcgttgaaag

SEQ ID NO: 17910 - RNA, 143 nt, Rugamonas rivuli
  source 1..143: mol_type = other RNA; note = Related to WHUF01000005.1
ttcaagccggtctgtctttgcctcgtgcagggacagcctctacggggctaccccgtgggatgtttaatgttcagcacttcgccgcatgagccgcgttgcgtttccacgcaagactgctcacgcatcacgagactcgttgaagg

SEQ ID NO: 17911 - RNA, 142 nt, Duganella sp.
  source 1..142: mol_type = other RNA; note = Related to QVIN01000001.1
ttcaagccggcctgtctttgcttcggcagggacagcctctacggggctaccccgtgggatgtttaatgttcagcacttcgccgcatgagcgccgttgcgctaccgcgcaagacagctcacgcatcacgagactcgttgaagg

SEQ ID NO: 17912 - RNA, 143 nt, Duganella sp.
  source 1..143: mol_type = other RNA; note = Related to QVIO01000002.1
ttcaagccggcctgtctttgccgcgtgcagggacagcctctacggggctaccccgtgggatgtttaatgttcagcacttcgccgcatgagccgcgttgcgttaccacgcaagttagctcacgcatcacgagactcgttgaagg

SEQ ID NO: 17913 - RNA, 143 nt, Massilia guangdongensis
  source 1..143: mol_type = other RNA; note = Related to NZ_WWCJ01000021.1
tccaagccggcctgttcttgccttgtgcatggacagcctctgcggggctaccccgcgggatattgaaggtcctgctttacgccgcatgagcgtctttgcgctaccgcgcaactctgctcacgcatcacgagactcgttgaagg

SEQ ID NO: 17914 - RNA, 144 nt, unidentified
  source 1..144: mol_type = other RNA; note = Related to JACMNR010000433.1; note = Bdellovibrionales bacterium
ttcaagccggcacgactttaccctgtgtaaagaattgcctccgcggggttaccccacgggatattcattgcttcgcatttcaccgcatgagcgaccgtgcacaaaaacgcaccttggctcacgcatcacgagactcgttgaagg

SEQ ID NO: 17915 - RNA, 144 nt, Massilia mucilaginosa
  source 1..144: mol_type = other RNA; note = Related to WHJH01000043.1
ttcaagccggcctgttcttgcctggtgcagggacatgcctctgcggggctaccccgtgggaactatattgctgtgcaattcaccgcatgagccgccgtgcgctgccgcgcacttaagctcaagcttcacgagactggttgaagg

SEQ ID NO: 17916 - RNA, 141 nt, Massilia sp.
  source 1..141: mol_type = other RNA; note = Related to FQWU01000004.1
ttcaagcagacaggctttcgtcttgtaaaaggcgagtctccatggggttaccccatgaaatttttaatgttttgcatttcatcgcaagagattctgtgtgcttcgcacacgggcactcgagcgtcacaagtacgttgaagg

SEQ ID NO: 17917 - RNA, 143 nt, Collimonas fungivorans
  source 1..143: mol_type = other RNA; note = Related to NZ_CP013232.1
ttcaagccggcgcgctgttacctcgtgtaatggaacgcctctgcggggctaccccgcgggatattttggcttggcaatgcaacgcatgagcggcgctgcaccacggtgcagatatgctcacgcatgacgggactggttgaagg

SEQ ID NO: 17918 - RNA, 144 nt, Collimonas sp.
  source 1..144: mol_type = other RNA; note = Related to FOLC01000015.1
ttcaagccggcgcactgttaccttgtgtaatgggacgcctctgcggggttaccccgcgggatattttggctgggcaatgcaacgcatgagcggccctgcaccacggtgcaggctcggctcacgcatgacgggactggttgaagg

SEQ ID NO: 17919 - RNA, 143 nt, Collimonas sp.
  source 1..143: mol_type = other RNA; note = Related to PDBX01000001.1
ttcaagtcggcgtgctgttacctggtgtagcggagcgcctctgcggggctaccccgtgggatattttggcttggcaatgcagcgcatgagcggcgctgcaccctgatgcaggtttgctcatgcatgacgggactggttgaagg

SEQ ID NO: 17920 - RNA, 143 nt, unidentified
  source 1..143: mol_type = other RNA; note = Related to JACOUL010000024.1; note = Burkholderiales bacterium
ttcaagtcggcgcgatgtcacctcgtgtgatgaaacgcctctgcagggctaccctgcgggacatttttgattgggcaatgcaacgcatgagccgaactgcacgctgtgcaggactgctcatgcataacaagactggttgaagg

SEQ ID NO: 17921 - RNA, 138 nt, Undibacterium pigrum
  source 1..138: mol_type = other RNA; note = Related to NZ_QJKB01000006.1
tgcaagctggcgctcagacgcaagtccatagtgcctctgcggggttaccccgcgggataaatttacctggtatttcatcgcgtgagccgccctgcacttcatgcagattggctcacacttgacgagactggttgcagg

SEQ ID NO: 17922 - RNA, 150 nt, Undibacterium sp.
  source 1..150: mol_type = other RNA; note = Related to JAKZHX010000011.1
ttcaagcctggtgcacagatgcagttcaccgcaaatcaaatgcacctctgcggggttaccccgcaggacagacagacctggtatttcatcgcgtgagccgccttgcactgacgtgcaaacaggctcacacttcacaagactggttgaagg

SEQ ID NO: 17923 - RNA, 144 nt, unidentified
  source 1..144: mol_type = other RNA; note = Related to JAGOHT010000005.1; note = Alphaproteobacteria bacterium
tgcaagcttggccggtgtttttgcatccaaagacaccgccgctccggggttaccccggggacttattttaaggcaccaatacagcccatgagcgaccctgcacgttgtgcagcgcagctcatggcagacgagactggttgcaca

SEQ ID NO: 17924 - RNA, 148 nt, Nevskia soli
  source 1..148: mol_type = other RNA; note = Related to NZ_JONR01000045.1
ttcaagctggcaggcaagtcctctgtacgtagacttcttgcctctccggggttaccccggggttggttcctgatggtggcaaaatcgtcccacgagcgggtctgcacgaggtgcagtgcggctcgtggacaacgcgactggttggaga

SEQ ID NO: 17925 - RNA, 156 nt, unidentified
  source 1..156: mol_type = other RNA; note = Related to JAEUMY010000023.1; note = Betaproteobacteria bacterium
tccaagcggatggtgattgcgtaggtttccttttcgcagtcatatctctccggggataccccggggttcttgatgtacccaggcaattcgtctcatgagccgcgttgcacgacaagcgcgcaaagatggctcatgaatgactcgacaggttggagc

SEQ ID NO: 17926 - RNA, 143 nt, unidentified
  source 1..143: mol_type = other RNA; note = Related to NATR01000129.1; note = gamma proteobacterium symbiont of Ctena orbiculata
tccgagcggttccacgagatttgcacgcaaacccgtggaagactccggggttaccccggggtggcgttatagctgacatttcattgccggtacggcactgcgcttcacgcagtgttgtacaggcccgacgagcaggtcggagg

SEQ ID NO: 17927 - RNA, 146 nt, unidentified
  source 1..146: mol_type = other RNA; note = Related to NZ_MARB01000009.1; note = Candidatus Thiodiazotropha endolucinida
tccgagcagttccgcgactatggcacgccaaggtcgccggacactccggggctaccccggggtagcgttatagccaacatttccgttgctggtaccacgttgcgcttcacgcaagagggtaccagccatacgagcagggtcggagg

SEQ ID NO: 17928 - RNA, 149 nt, unidentified
  source 1..149: mol_type = other RNA; note = Related to JAGRGZ010000050.1; note = Gammaproteobacteria bacterium
ttcgagcggttccatggcctggcgatgccggggttctggaacgctccggggttaccccggggatgcctggttcagtctgacaatgcattgccggtacaccactgcgctgcacgcagatgctgtaccggcgggacgagagtggtcgaagg

SEQ ID NO: 17929 - RNA, 148 nt, unidentified
  source 1..148: mol_type = other RNA; note = Related to JAGRGX010000033.1; note = Gammaproteobacteria bacterium
tccgagtattacccagagcgtcgtcttggcgatgtccgcgggtgctccggggaaaccccggggttctgatttcactcgcacactgcgtggccggtacgtcactgcacgtcgtgcagaaacgcaccggcacaaccggcatggtcggagg

SEQ ID NO: 17930 - RNA, 149 nt, unidentified
  source 1..149: mol_type = other RNA; note = Related to JAGRGY010000021.1; note = Gammaproteobacteria bacterium
tccgagctcaccccggttcccgccatcggcgtggccgcgggcgctccggggaaaccccgggggacgtctcgtctaccgacacatctcgccgccggtacgtcgctgcacggcgtgcagacacgtaccggcccgacaggcctcgtcggagg

SEQ ID NO: 17931 - RNA, 146 nt, unidentified
  source 1..146: mol_type = other RNA; note = Related to SCTB01000034.1; note = Alphaproteobacteria bacterium
ttcgagatattccgcgttcaacttcggttggattgaggaattctccggggttaccccggggaagagtttttccgaggacatttcgtgtccggtgcgtccctgcacgttgtgcagcacggcaccggaaataccagaattgtcgaagg

SEQ ID NO: 17932 - RNA, 150 nt, unidentified
  source 1..150: mol_type = other RNA; note = Related to WGNE01000059.1; note = Alphaproteobacteria bacterium
tccgagacgttcctgattttgacttttgttgaacgaaggaactctccggggttaccccggggaatggtttttgcctggacatatcatgtccggtgcgtccctgcgcctttacgcgcagcgcggcaccggaaacacgagaagcgtcggagg

SEQ ID NO: 17933 - RNA, 145 nt, unidentified
  source 1..145: mol_type = other RNA; note = Related to PBDO01000002.1; note = Pseudomonadales bacterium
tccgagcgtttcatcacggggcttggccccagggtgaaagctccggggttaccccgggggcgattcaacagtaagaacacaccgtagttggtacggcgcttcgctgcacgcagtaccgtactgaatggaccagactggtcggaga

SEQ ID NO: 17934 - RNA, 130 nt, Imhoffiella purpurea
  source 1..130: mol_type = other RNA; note = Related to NZ_AONC01000057.1
cccgaggcggccgcgatcggcggcctctccggggctaccccgggggagatccccaaccaggcattccgacgcacgtgcgtccctgcgctccgcgcagggctgcacgcgcctccacgagacgggtcggggc

SEQ ID NO: 17935 - RNA, 130 nt, Thiorhodococcus minor
  source 1..130: mol_type = other RNA; note = Related to JAAIJQ010000073.1
cccgaggtggccagcatcatcggcctctccggggctaccccgggggcgattcccaaccaggcagtccagtgcacgggcgaccctgcgctccacgcagggctgcccgcgcgcccacgagacgggtcggggc

SEQ ID NO: 17936 - RNA, 146 nt, unidentified
  source 1..146: mol_type = other RNA; note = Related to JAGRGW010000386.1; note = Gammaproteobacteria bacterium
tccgagattgcccgtactcaccgccatgaggcgtgttcgggcactccggggataccccggggttattttccatacaagcaacacagcgcacggacggcgctgcgccttgcgcagctttgtccgcgcaaagagagcagggtcggagt

SEQ ID NO: 17937 - RNA, 135 nt, Acidovorax sp.
  source 1..135: mol_type = other RNA; note = Related to LUKZ01000009.1
gccaagcatgtcgagcctgcacaggttcgggccatggggcagccccacggtgttctcctcatacgcccacattggggcgcgcgaaccagccgccaccggtggcaaacagttcgcgcccaacccgctggttggtac

SEQ ID NO: 17938 - RNA, 135 nt, Acidovorax kalamii
  source 1..135: mol_type = other RNA; note = Related to NZ_NOIG01000002.1
gccaagcatgtcgagcctgcacaggttcgggccgtggggcagccccacggtgttctcctcatacgcgcacattggggcgcgcgaaccagccgccaccggtggcaaacagttcgcgcccaacccgctggttggtac

SEQ ID NO: 17939 - RNA, 138 nt, Acidovorax sp.
  source 1..138: mol_type = other RNA; note = Related to NZ_CP035951.1
gccaagcacttcgagcctgttgatcaggatcgagccgtggggcagccccacggtgttgtcttccaacgcgtccatcgcggcgcgcgaacctcccgccacccgtggcgtgcagttcgcacccaacccgcaggttggcac

SEQ ID NO: 17940 - RNA, 138 nt, Acidovorax radicis
  source 1..138: mol_type = other RNA; note = Related to NZ_AFBG01000026.1
gccaagcatttcgagcctgttcatcaggttcgagccgtggggcagccccacggtgttgtcttccaaagcgtccatcgcggcgcacgaacgtcacgccacccgtggcgcgatgttcgcgcccaacccgccggttggcac

SEQ ID NO: 17941 - RNA, 135 nt, Acidovorax sp.
  source 1..135: mol_type = other RNA; note = Related to JAHUWH010000023.1
gccaagcatctcgaactctcaccggttcgaaccgtggggtagccccacggtgtctcactgcaagcgcccattgtggcgcgcgaacctccaagccatcctggcaagcgtgttcgcgcccaacccgccggttggtgc

SEQ ID NO: 17942 - RNA, 133 nt, Acidovorax sp.
  source 1..133: mol_type = other RNA; note = Related to AKJX01000004.1
gccaagcattctgaaccactgaaggttcgggccgtggggtagccccacggtgtatccgacaagcacgcttcgcggcgcgcgaaccacccgccacccgtggcgcccagttcgcgcccgacccgcaggttggtgc

SEQ ID NO: 17943 - RNA, 133 nt, Acidovorax soli
  source 1..133: mol_type = other RNA; note = Related to JACHLK010000020.1
gccaagcattccgaccccttaccggttcgggccgtggggtagccccacggtgtatctggcaagcgcacatcgcggcgcgcgaacctcctgccatccgtggcaccaggttcgcgcccaacccgcaggttggcgc

SEQ ID NO: 17944 - RNA, 133 nt, unidentified
  source 1..133: mol_type = other RNA; note = Related to JAFKGX010000054.1; note = Comamonadaceae bacterium
gccaagcattccgagcctgtcagggttcgggccgtggggcagccccacggtattcctcgcaagcgcacatcggggcgcgcgaaccgcacgccacccgtggcgacccgttcgcgcacgacctgccggttggcgc

SEQ ID NO: 17945 - RNA, 158 nt, Ottowia sp.
  source 1..158: mol_type = other RNA; note = Related to JAGOEM010000124.1
accaagcctttcgagtgttgattgggtctgcttcggcaggtacaggaaaagctcgggctgtggggcttccccacggtcaacctccagcgtgacattgcggcgcacgaacgccactcctgctcaggagccctgttcgtgcacaacccgcacgttggctg

SEQ ID NO: 17946 - RNA, 168 nt, Diaphorobacter sp.
  source 1..168: mol_type = other RNA; note = Related to NZ_JADKYZ010000005.1
gccaagcgttgccgcattggctccacccgcgttcatgcaacgcatgtggtttcgtcaatacgggccgtggggcatccccatggttgctttcaaaatggacttcaccgggcgcgaacttcccgcggattcatctcgcaacctgttcgcgcaagacctgcaggttggcag

SEQ ID NO: 17947 - RNA, 138 nt, unidentified
  source 1..138: mol_type = other RNA; note = Related to RDZW01000120.1; note = Burkholderiales bacterium
gtcaagattgctgattcgtctgcaatcctggcgctccggggcatccccggggttattggataggtgtgcatttcggtgcatgagcccgacctgcgctttcagcgcagatcagctaatgcgagaccggttggttgaagc

SEQ ID NO: 17948 - RNA, 141 nt, Hydrogenophaga taeniospiralis
  source 1..141: mol_type = other RNA; note = Related to NZ_BCWR01000006.1
ttcaagatctctcgaagacgctggtcgttttcgggctgtggggcatccccacggcgacgatgctttcctggacacacggcgcgcgatcccgacctgcgccgctggcgcaggacagatagcgccagacctgctggttgaagc

SEQ ID NO: 17949 - RNA, 140 nt, unidentified
  source 1..140: mol_type = other RNA; note = Related to PHCR01000005.1; note = Betaproteobacteria bacterium HGW-Betaproteobacteria-15
ttcaagatccctcgaagacgctggtcgttttcgggctgtggggtatccccacggcgacgatggtttcctggacacacgacgcgcgatccgcgctgcgccgctggcgcagaccagatagcgctggacctgctggttgaggc

SEQ ID NO: 17950 - RNA, 141 nt, Hydrogenophaga sp.
  source 1..141: mol_type = other RNA; note = Related to NZ_CP063400.1
ttcaagaaccctcgaagacgctcgacgttttcgggctgtggggcatccccacggcgacacacgattccctggacacacgacgcgcgatccgcgctgcgccgctggcgcaggacagatcgcaccggaccggctggttggaac

SEQ ID NO: 17951 - RNA, 140 nt, Hydrogenophaga flava
  source 1..140: mol_type = other RNA; note = Related to NZ_BCTF01000032.1
gccaagcgcaatcgaaagcctcttggttttcgggctgtggggcatccccatggcaacgtctgatggttggcacacacggcgcgcgatccgcgctgcgccgctggcgcaggacagatcgcacccgaccggctggttggcgc

SEQ ID NO: 17952 - RNA, 144 nt, Ottowia testudinis
  source 1..144: mol_type = other RNA; note = Related to NZ_CP071796.1
ttcaagaaccatcgagaacgcgtttttgcgtttttcgggccgtggggcatccccacggcaagttatcttgtgtgcgcattccggcgcgcgatcggccttgcgctgccacgcaaacatgatcgcgcacgaccggctggttgaagc

SEQ ID NO: 17953 - RNA, 135 nt, Mitsuaria sp.
  source 1..135: mol_type = other RNA; note = Related to NZ_CP011514.1
gccaagccttcggaagcgttcgcgcctccggccgcggggcatccccgcggcgctcttcttcgttagtcatccggcgccgataccgagccacgctgccgcgcggacctgtatcggtcgagaccggccagttggcgg

SEQ ID NO: 17954 - RNA, 134 nt, Mitsuaria chitosanitabida
  source 1..134: mol_type = other RNA; note = Related to NZ_BCYP01000018.1
gccaagctttcggaagcgcttgcgcctccggccgcggggcatccccgcggcgctctcgttggacagccatccggcgccggttcggcaccgcgctcgcgcgcggagatgaacccgcgagaccggtgagttggcgg

SEQ ID NO: 17955 - RNA, 134 nt, Roseateles depolymerans
  source 1..134: mol_type = other RNA; note = Related to CP013729.1
gccaagcctgtcggaggctctggcttccgggccgcggggcatccccgtggcatcgcattgagtgacgcattccggcgcgagatccgccttgcgcttcgcgcaacacagaactcgcaggaccggctcgttggcag

SEQ ID NO: 17956 - RNA, 134 nt, Roseateles terrae
  source 1..134: mol_type = other RNA; note = Related to JACHXO010000004.1
gccaagcatgtcgaaggcttcggctttcgggccgcggggcatccccgtggcatttttcagagtgaggcattccggcgcgccttcggcaatgcgctgcgcgcatcggagaaatcgcaggaccggctcgttggtgg

SEQ ID NO: 17957 - RNA, 135 nt, Roseateles sp.
  source 1..135: mol_type = other RNA; note = Related to FOAV01000002.1
gccaagcatgtcggaggctcacgcttccgggccccggggaatccccggggcatcgtccatagtgattcattccggcgcgagttccgacgtgcgctccgcgcattccagaacatcgccagaccggccggttggtgg

SEQ ID NO: 17958 - RNA, 136 nt, Ramlibacter sp.
  source 1..136: mol_type = other RNA; note = Related to JACORT010000001.1
ttcaagcattcaccggtaccggaaggtcccgggccgtggggcatccccacggcatcccttcgaagctgccatcacgttgcggaatggccgttgcgcgctgcgcaagacgcatgccgcagcacccgctggttggggc

SEQ ID NO: 17959 - RNA, 136 nt, Ramlibacter sp.
  source 1..136: mol_type = other RNA; note = Related to RKMB01000020.1
ttcaagcatcatcgagggtgaaagaccttcgggccgtggggcatccccacggcatctcttgaagttggcattacggcgcgtgatgcgcactgcgcgaaaacgcaggagtcatcacgcctgacccgctggttggagt

SEQ ID NO: 17960 - RNA, 136 nt, Ramlibacter sp.
  source 1..136: mol_type = other RNA; note = Related to JAHBZO010000019.1
ttcaagcattaccgaggtttaaaagcctcgggctacggggtatccccatagcaatagttctagcaagcatttcggcgcgtgatgccaactgcgactgcgtcgcagcgcacatctcgcttgaccggctggttgaggg

SEQ ID NO: 17961 - RNA, 151 nt, Aquabacterium terrae
  source 1..151: mol_type = other RNA; note = Related to NZ_JABRWJ010000001.1
cccaagtcttgccgaggctcaccgaccccgtgcggtggtttcgggccgcggggtttccccgcggcaggttccagcactcgatcttttcggcgcgtgaccggacctgcgctgacgcgcagacctggtcgcgcatcacctgctcagttgggaa

SEQ ID NO: 17962 - RNA, 147 nt, Variovorax paradoxus
  source 1..147: mol_type = other RNA; note = Related to NZ_CP045644.1
ttcaagactcgacaaggtgatgcgattcgtcgtttgaccttgtgctgcggggaaaccccgcggtggatggatggctacccgttccggcgcgcaagcggatctgcgctaacgcgcagcccagctggcgcatcaccggcaggttgaagg

SEQ ID NO: 17963 - RNA, 135 nt, Variovorax sp.
  source 1..135: mol_type = other RNA; note = Related to NZ_CP046508.1
gacaaggcgggcgattcgtcgctttccttgtgctgcggggcacccccgcggtcgatggatgggtacgcatttcggcgcgtgagcggaactgcgctgtcgcgcagcgcagctggcgcatcaccggctggttgaagg

SEQ ID NO: 17964 - RNA, 147 nt, Variovorax guangxiensis
  source 1..147: mol_type = other RNA; note = Related to NZ_RXFT01000006.1
ttcaagactcgacaaggccctgcgatccgtcgcccggtcttgtgctgcggggtaaccccgtggcggatggatggcttcgcattccggcgcgcaagcggcgctgcgcatccgcgcagaccagctggcgcatcaccggctggttgaagg

SEQ ID NO: 17965 - RNA, 147 nt, Variovorax sp.
  source 1..147: mol_type = other RNA; note = Related to FOLP01000001.1
ttcaagactcggcaaggcttcgcgatccgtcgttcggccttgtgctgcggggataccccgtggtggatggatggctacccatttcggcgcgcaagcgcgtctgcgctcacgcgcagcacagctggcgcatcaccggctggttgaagg

SEQ ID NO: 17966 - RNA, 147 nt, Variovorax sp.
  source 1..147: mol_type = other RNA; note = Related to FOWG01000009.1
ttcaagacacgacgaggccctgcgatccgtcgccttgcctcgtgctgcggggtacccccgcggtggatggatggttgcccattccggcgcgcaagcgggactgcgctcacgcgcaggacagctggcgcttcaccggctggttgaagc

SEQ ID NO: 17967 - RNA, 147 nt, Polaromonas sp.
  source 1..147: mol_type = other RNA; note = Related to FPBM01000001.1
tccaagtgttgcgagcggaatgcgattcgttgctgcccgtccgcaccatggggtacccccatggttgttttgtactctgcgatttcggcgcgtgagcggcctgcgcattctgcgcacccagctcacgcgggacctgctggttgggat

SEQ ID NO: 17968 - RNA, 147 nt, Rhodoferax sp.
  source 1..147: mol_type = other RNA; note = Related to FNJA01000002.1
gccaagtgtcgtgagcccagggcaatacgttgttctgactcgcactgtggggtacccccacggttgttttattaccgagccatctcggtgcgtgcgccacacgcgcatgctgcgcggactgcccacgccggacctgctggttgacgc

SEQ ID NO: 17969 - RNA, 151 nt, unidentified
  source 1..151: mol_type = other RNA; note = Related to JACRAZ010000105.1; note = Burkholderiales bacterium
gccaagcgttcaccggttgccggccgatccgtcgaccgacaccgggctccggggtttccccggggcaggttcatcacccagtcctttcggcgcgtgaccggccgtgcgctgaccgcgcacacaaggtcacgcctcacccgcaggttggcgg

SEQ ID NO: 17970 - RNA, 142 nt, Aquabacterium sp.
  source 1..142: mol_type = other RNA; note = Related to SCTQ01000267.1
gcgaggcccttgcggaaggcgattcgtcgcttgccgtgccgcggggcacccccgcggttcactgatcactcaggcacttcgtcgcgcgaccttcagtgctcgatcgagcacggctgctcgcgcctgaccggctcgctcgcag

SEQ ID NO: 17971 - RNA, 142 nt, Rhizobacter sp.
  source 1..142: mol_type = other RNA; note = Related to NZ_LMDI01000005.1
cccaagcacatcgtggaccggcgcttcggaaccgggtctgccccgcggggtacccccgcggtggattgttggctggtacatcctgggcgtgaggcgacggcgcaatgcgcccacacctcacgcatcacccgcaggttgggcg

SEQ ID NO: 17972 - RNA, 145 nt, Ideonella sp.
  source 1..145: mol_type = other RNA; note = Related to PTEU01000001.1
cgcaagtgtttcgcgagaccgttcttttcaagagcactcgcacagcggggttcccccgtctgttgaattgtgttgtggccaccgaggcgtgatcgacctggcgacccgtcgccaaccagatcacgcatcacctgcaggttgtgta

SEQ ID NO: 17973 - RNA, 142 nt, unidentified
  source 1..142: mol_type = other RNA; note = Related to DXIO01000116.1; note = Candidatus Aquabacterium excrementipullorum
tccaagtttccggcgatccagttcatgcaattggctcgcactctggggataccccagggttacccatcggcatcccgacgagaggcatgtgcgggtcggcgatcctcgccgctcagctcacgcatcacccgcaggttggatg

SEQ ID NO: 17974 - RNA, 127 nt, Ideonella azotifigens
  source 1..127: mol_type = other RNA; note = Related to NZ_JAJNKD010000019.1
ctcgtgctggcggtggcgtcttcgcgccgcggggtacccccgcggttgatggtttgcctggtactttcggggcgtgagcggagtggctgtttgccaatcagctcacgcatcacccgcaggttgggtg

SEQ ID NO: 17975 - RNA, 146 nt, unidentified
  source 1..146: mol_type = other RNA; note = Related to JAEKKG010000289.1; note = Burkholderiales bacterium
cccaagtgtccttcggaacgttcatcgaacccattccgatccgcggggtacccccgtcggcaacgctcttgtcatgcccatccgaggcgatggccaccgcgtcgctgcgcgacgccacaccattcgcatcaccagcaggttgggcg

SEQ ID NO: 17976 - RNA, 132 nt, Pelomonas sp.
  source 1..132: mol_type = other RNA; note = Related to JAJTWU010000010.1
ccgaggtcctggcaagccttcacgggtttgcactccggggtacccccgggggttgccgatctcgcgtccagcagggcatggagcgcggggcgctgtgcgcccgacaccccatgcatcacccgtcgctcgggc

SEQ ID NO: 17977 - RNA, 134 nt, Pelomonas sp.
  source 1..134: mol_type = other RNA; note = Related to NZ_LMFP01000011.1
cccgaggtctttgccagccttcacgggcgggcactccggggcacccccgggggtcttgaatctctcgtccggcagggcgcgagcccggtggcgcaaagcgccaggcagctcacgcatcacccgtcgctcgggca

SEQ ID NO: 17978 - RNA, 131 nt, Pelomonas sp.
  source 1..131: mol_type = other RNA; note = Related to JAJTWT010000006.1
ccgaggtcttcgcgagcctttgggcaagtactccggggcacccccgggggtcatggatgtctcgacccgcagggcgtgagaacgccgggcgcacagcgcccttcacctcacgcatcacccgtcgctcgggc

SEQ ID NO: 17979 - RNA, 133 nt, unidentified
  source 1..133: mol_type = other RNA; note = Related to JAACZV010000015.1; note = Comamonadaceae bacterium
ccgaggtctttgccagccctcacgggccagcactccggggcaaccccgggggtcttgaatctcgcgtccagcagggcgtgagcggtcccggcgcaaggcgccagccacctcacgcgccacccgtcgctcggtc

SEQ ID NO: 17980 - RNA, 134 nt, unidentified
  source 1..134: mol_type = other RNA; note = Related to JAEKLF010000057.1; note = Burkholderiales bacterium
ccgaggtctttgccagccttcacgggcgggcactccggggcaacccccgggggttctgagtctctcgtccagcagggcgtgagaacgcctggcgcaatgcgccaatcacctcacgcaccacccgtcgctcgggc

SEQ ID NO: 17981 - RNA, 150 nt, Paucibacter sp.
  source 1..150: mol_type = other RNA; note = Related to QAJN01000008.1
cccaagttctccgtgaagtgcatgcacggctgtgtttgcgcctcacacccaggggcaccccctgggtcatgtttttgttgaagtcaatcggggcctgatcggcgtggcgctgtgcgccagtcggatcaggcaggacccgcaggttgggca

SEQ ID NO: 17982 - RNA, 138 nt, Rhizobacter sp.
  source 1..138: mol_type = other RNA; note = Related to LMHL01000001.1
gccgagcagaaacgggttgcagtacggacccggctgtggggcacccccacggcatcgagtcgactttggcattcgcggtgcaagcccgacgtgcgctgacgcgcacgccagctgaccacgagaccggcaggtcggcgt

SEQ ID NO: 17983 - RNA, 138 nt, Rhizobacter sp.
  source 1..138: mol_type = other RNA; note = Related to FRCQ01000002.1
gccgagcagacacgggtcgccgttcagggcccggctgtggggtacccccatggcatcgaatcgatcttggcatccgcggtgcaagagggtgtgcgctgacgcgcacgtcttcttggcacgggaccggcaggtcggcgt

SEQ ID NO: 17984 - RNA, 139 nt, unidentified
  source 1..139: mol_type = other RNA; note = Related to VBCX01000083.1; note = Betaproteobacteria bacterium
tccaagcacgacgcaagttcagttgttcggacttgcgctgtggggcacccccatggctttgattcgacgatggcatacgcggcgtgagccgcaatgcgcggtgcgcgtgattgctcacgcgagaccggcaggttggagt

SEQ ID NO: 17985 - RNA, 141 nt, unidentified
  source 1..141: mol_type = other RNA; note = Related to JACKEI010000001.1; note = Sandaracinaceae bacterium
accgagcgtgcacactctggcggagctcgtctctgcctctccggggttaccccggagacacgacctagtcgcccattgcgaggcgcgcccgtccggacacttcatgtccgcctgggcgggcccggcgggactcgtcgggga

SEQ ID NO: 17986 - RNA, 131 nt, unidentified
  source 1..131: mol_type = other RNA; note = Related to JACKEJ010000006.1; note = Sandaracinaceae bacterium
cgcaacgcggcagagcctggctctgcctctccggggttaccccggggacacgtatcgaccacccttcacgaggcacgtccgccccgacaccccatgtcgatctggacgcgccccttcggactcgtcgggga

SEQ ID NO: 17987 - RNA, 139 nt, unidentified
  source 1..139: mol_type = other RNA; note = Related to JACRCU010000218.1; note = Deltaproteobacteria bacterium
gccaagcagaccaccggcagccctgccgcggtctctctggggctaccccagggcaaattcatcggcctgcccggccaccgcaggacccgcagcgtcgctccgcacgcgtccggtcctgcacgacgagcgaggttggcgc

SEQ ID NO: 17988 - RNA, 137 nt, unidentified
  source 1..137: mol_type = other RNA; note = Related to JACKIB010000005.1; note = Planctomycetes bacterium
tgcgagactggtgtgcgcccatggcgcacaccgctccggggcttccccggggactcaaatctgactgacgcatctcgagcacgacagctcagcggcggacgccgctcccgagtcgcgccccacacgtaggtcgcggt

SEQ ID NO: 17989 - RNA, 135 nt, unidentified
  source 1..135: mol_type = other RNA; note = Related to MDLA01000158.1; note = Chromatiales bacterium (ex Bugula neritina AB1)
tcctggttcttccagcgtagttaactcctcgctgggctttggggctaccccaaggtaatgtattgcttccattacgtggccagaacggccctgcactgcgtgcagatctgttcttgcgatattatgagcaggatg

SEQ ID NO: 17990 - RNA, 133 nt, Granulosicoccus sp.
  source 1..133: mol_type = other RNA; note = Related to JAHQWB010000596.1
tccaagctattcccgtaagctctgtgcttatcggactctggggataccccagggttgaatactacaggcatttcacggcaggaacgatattgcacttcgtgcaagcccgttcatgcgattcaagggttggatg

SEQ ID NO: 17991 - RNA, 133 nt, unidentified
  source 1..133: mol_type = other RNA; note = Related to MABD01000012.1; note = Gammaproteobacteria bacterium 45_16_T64
tccaagctataccgactaagctaaggtttgggcgggctttggggttaccccaaggttgagttttactggcgttacgttgcgaaaacggtgttgcacggtgtgcaagtccgtttacgcgaattagggttgggtg

SEQ ID NO: 17992 - RNA, 134 nt, Exilibacterium tricleocarpae
  source 1..134: mol_type = other RNA; note = Related to NZ_ML660090.1
ctcaagcattacctggtggcttgtccttcagggctttggggtaaccccaaggcggtggtttgtcggcttaacgttgcaagtatggtattgcaccttcagtgcaaagctatacttgcgtggggcagggttgagtg

SEQ ID NO: 17993 - RNA, 152 nt, Hahella sp.
  source 1..152: mol_type = other RNA; note = Related to NZ_CP035490.1
ttcaagcgagcgtgatccggaaccggcgcgaccgggcctgatccgttgctccggggctaccccggggttacatgttgactacgcatatcgccgtccataccgccctacgccaaggcgtagaacggtatcgaccacgggaggagggttggagc

SEQ ID NO: 17994 - RNA, 152 nt, Hahella chejuensis
  source 1..152: mol_type = other RNA; note = Related to NC_007645.1
ttcaagcgaacgtgatccggaaccggcgcgaccgggccaggtccgttgctccggggctaccccggggttacatgttgactacgcatatcgccgtccataccgccctacgccaaggcgtagaacggtatcgaccacgggaggagggttggagc

SEQ ID NO: 17995 - RNA, 151 nt, Hahella ganghwensis
  source 1..151: mol_type = other RNA; note = Related to NZ_AQXX01000078.1
ttcaagcgattccggaagcaatgagtcagtcatttgtcaccggaaactccggggttaccccggggttaaacgtcaacgacacatatcaccgccggtaaggccctgcgctatgcgcgcagatactttaccggcaacacgagttggttgaagt

SEQ ID NO: 17996 - RNA, 150 nt, Hahella sp.
  source 1..150: mol_type = other RNA; note = Related to MRYI01000026.1
tccaagcgaacctgacaggctaaggtacgacctctgccagtcggtacttcggggtaaccccgaggctatgcgttaaccattcatttcaacgccggtaaggcactgcgctataagcgcagccggttaccggctacttcagcgggttggagt

SEQ ID NO: 17997 - RNA, 127 nt, unidentified
  source 1..127: mol_type = other RNA; note = Related to JABLXQ010000049.1; note = Gammaproteobacteria bacterium
cctgagcctgtgttgtccccgtacaacacgctttggggttaccccaaggtccatcctgatccaccgttgcatcgtatgaacttcgctgcgctgcgcgcagtgcagttcacacgagagtagtcgtctc

SEQ ID NO: 17998 - RNA, 140 nt, unidentified
  source 1..140: mol_type = other RNA; note = Related to VISH01000001.1; note = Alteromonadaceae bacterium 2753L.S.0a.02
atcaggacatagcccataaaacttgttttacagggcgctttgaggttacctcaaggttatcgtatgcagttagacctatcagggtgtgtacggcggtgcgcggtgcgcacggaagtacacacagaaccagcggctggtgt

SEQ ID NO: 17999 - RNA, 159 nt, Ketobacter sp.
  source 1..159: mol_type = other RNA; note = Related to RCHN01000046.1
atcaggacttgggaacagagcctcaacctggacacgttcagatcgagctttgctccgctccggggctaccccggggtttttcaggatcaccccatgacattgccaggatgtccggtgcgctccacgcacgggactcctgacggtaccggcggctgatac

SEQ ID NO: 18000 - RNA, 135 nt, unidentified
  source 1..135: mol_type = other RNA; note = Related to JABJPU010000111.1; note = Methylococcales bacterium
ttcaaggttttgggatgcatcgtcaacccaactttggggttaccccaagggtgtagtaaattgaaacaatccatgccgtgagcaacgtggcattgtcatgccaatatgctcacgtatgacaagttaagttgaagg

SEQ ID NO: 18001 - RNA, 148 nt, unidentified
  source 1..148: mol_type = other RNA; note = Related to CP065008.1; note = Alphaproteobacteria bacterium
tgcgagatgttcccaatcaatagcctgactatgacgggaactctgcggggcatccccgcggattggatcaaaactggacatttcacgcctgtacgccaagtgcgctgacacgcactgcgcgtacaagcacgacgagacgggtcgcagg

SEQ ID NO: 18002 - RNA, 147 nt, unidentified
  source 1..147: mol_type = other RNA; note = Related to JAGRIJ010000030.1; note = Alphaproteobacteria bacterium
cgcgagaatgttcctgagcgttagcatgactatatcagggactctgcggggcatccccgcggattgtttttaacgcaaccatatcgtcaccattacttcgttgcgctccgcgcaaacatgtaatggcaaaaccggacaggtcgcccg

SEQ ID NO: 18003 - RNA, 144 nt, Archangium gephyra
  source 1..144: mol_type = other RNA; note = Related to QFQP01000062.1
gtcaggccactcgatgaagtcacttcggtgacgacgtcagctccggggttgccccggggtgtggtcgtacgcaacacaggcaggagcaggtgcgcggtccactctcgtggacggggcaccatgcagcacaggcgtcgctgacgc

SEQ ID NO: 18004 - RNA, 145 nt, unidentified
  source 1..145: mol_type = other RNA; note = Related to JAACJQ010000409.1; note = Archangiaceae bacterium
agcaggatttcgatgtgcctcgcagtcctggagtcacgtctcttcggggcatccccgagggtgtggagcaattcaccgtgtcgtcgcgacgtcttgcgcggcactgcgtgccggagcgacatcgcagagctggtcaggctgttct

SEQ ID NO: 18005 - RNA, 176 nt, unidentified
  source 1..176: mol_type = other RNA; note = Related to JAEUIQ010000011.1; note = Planctomycetaceae bacterium
tccaagctgattgaatcgttggtagttttacctctgggtgtttgcgaaagcgaattcccatgcgatttgatctcggcggggttaccccgtcgttgactcgataggctggcatttcaggctgtggtagagtgcgccctcgcgcacgattccacagcgcaaactggtttggttgggcg

SEQ ID NO: 18006 - RNA, 137 nt, Propionivibrio sp.
  source 1..137: mol_type = other RNA; note = Related to JADKJO010000032.1
tccaggcgggttcgggttgcaagcagcccaaccgctccagggttaccctggggacttcttgatggctaatacttcgttgcctgagcgccgcacgcctgcggcgtgttcagctcaggctccacacgacaggctggaga

SEQ ID NO: 18007 - RNA, 139 nt, Azovibrio restrictus
  source 1..139: mol_type = other RNA; note = Related to NZ_AUCH01000007.1
tccaggcgtaagccgtcctcctcggagtccggcggctctggggttaccccagggatgttctggtagtccggtatttccctgcctgagcggcccacgcctgcggcgtgatctgctcaggcaccacacgacaggctggagg

SEQ ID NO: 18008 - RNA, 140 nt, Ferribacterium limneticum
  source 1..140: mol_type = other RNA; note = Related to NZ_CP075192.1
tccaggtgggtatcgggttgcattcaggcccggccactccggggttaccccggggatttttcggtagtttgcttattcattgcttgagcctcccacgcctgcggcgtgagcagctcaagcgccacacgacaggctggaga

SEQ ID NO: 18009 - RNA, 140 nt, unidentified
  source 1..140: mol_type = other RNA; note = Related to JAGTRU010000007.1; note = Proteobacteria bacterium
tccaggtgggttacgggttgtcgtcaaacccggccactccggggttaccccggggatttttcggtagttcggtttttccttgcctgagcgtcacacgcctgcggcgtgagcggctcaggcaccacacgacaggctggaga

SEQ ID NO: 18010 - RNA, 137 nt, Dechloromonas sp.
  source 1..137: mol_type = other RNA; note = Related to WBUO01000290.1
tccaggcgggttcggattgtctgcaatccggccacgccggggctaccccggcggtttttcgcagttggacttttcatcgcctgaacctcacacgccgctggcgtgacctgttcaggcaggacacgacaggctggaaa

SEQ ID NO: 18011 - RNA, 130 nt, unidentified
  source 1..130: mol_type = other RNA; note = Related to JAGRFZ010000003.1; note = Rhodocyclaceae bacterium
gccaggcgggccggctcggatcggccgctccggggctaccccggggactcactcgaccttcccattgacgcgcctgaacgcttcacgccgctggcgtgcccggttcaggctccacacgacaggctggcga

SEQ ID NO: 18012 - RNA, 130 nt, unidentified
  source 1..130: mol_type = other RNA; note = Related to JAGRFY010000153.1; note = Rhodocyclaceae bacterium
gccaggcgggccgacgccgatcggccgctccggggttaccccggggactccctcgaccttcccattgacgcgcctgaacgcctcacgccaccggcgtgcccggttcaggctccacacgacaggctggcga

SEQ ID NO: 18013 - RNA, 144 nt, Uliginosibacterium gangwonense
  source 1..144: mol_type = other RNA; note = Related to NZ_KB892867.1
cccaagcacaggctgatgcctgccttgcagacattggctcctccggggttaccccggggcgatacttgagctggcatttccgtgcatgagcccctctgcgcctgcggcgcagccaagcgcatgccacacacgacaggttgggcg

SEQ ID NO: 18014 - RNA, 141 nt, unidentified
  source 1..141: mol_type = other RNA; note = Related to JAEUNN010000841.1; note = Rhodocyclaceae bacterium
ttccagcgcgagtcggaggcacaagtgccttccggccacttcggggctaccccggggatgagtgatgttccggcattgcgtggcatgagccccgcggcgctccgcgccgggcagctcatgcaggacacggcaggtggaagg

SEQ ID NO: 18015 - RNA, 127 nt, unidentified
  source 1..127: mol_type = other RNA; note = Related to JAHCAA010000009.1; note = Rhodocyclaceae bacterium
ggccaggcttggccggtccggccactccggggctaccccggggatgattgtatttccggcatttcgtggcatgagcgtgacagcgcgctgcgccgggccgctcatgcaggacacggcaggtggaagc

SEQ ID NO: 18016 - RNA, 142 nt, unidentified
  source 1..142: mol_type = other RNA; note = Related to JADJSA010000006.1; note = Sterolibacteriaceae bacterium
tccaagcgcagcggcagggagtcgagaaactcctccgcgctcttgggttacccaagggtccagcatttccggcaaggcgcggcatgagcgccgctgcgcctgcgacgcaggactgctcatgcacgacacgacaggttggagc

SEQ ID NO: 18017 - RNA, 143 nt, unidentified
  source 1..143: mol_type = other RNA; note = Related to JADJHQ010000003.1; note = Sterolibacteriaceae bacterium
tccaagcacaacggtcagaggttcgagcaacccctccgcgctcttgggctacccaagggtcgagcacttccagcatcacgcggcatgagcggcactgcgcctgcggcgcagggttgctcacgcacgacacgacgggttggatt

SEQ ID NO: 18018 - RNA, 144 nt, Vandammella animalimorsus
  source 1..144: mol_type = other RNA; note = Related to NSJF01000001.1
tgcaggtcttcactggcatcgcccatggcgaccgcatgaccatggggcacccccatggatgcagacacacttggaaatcgcagcggctgtgccccacataccccagggtatgcaccgcacagccaggacacgacgggctgaagc

SEQ ID NO: 18019 - RNA, 137 nt, Maritalea sp.
  source 1..137: mol_type = other RNA; note = Related to JAKGTI010000001.1
ctctggttatgcctatacgacagtgtaaggcatggagcggggcatccccgtttataagtgttactgagacaaacacggcgctaccggcactgggcttcacccagatttggtagcgcaggacaaagaaaagcagaggc

SEQ ID NO: 18020 - RNA, 136 nt, Thalassococcus halodurans
  source 1..136: mol_type = other RNA; note = Related to FNUZ01000001.1
ttttggatacccttcgcatctacgcaaagggacgggcggggcatccccgtctattagactgaccttagcaaacacggcacaaccgcatctgggcgttgcccagtatgggtggtgcaaaaccgagacaggcaaaaac

SEQ ID NO: 18021 - RNA, 137 nt, unidentified
  source 1..137: mol_type = other RNA; note = Related to JAESRD010000022.1; note = Rhodobacteraceae bacterium
ctttggaatgctctgtacagcaatgtagagagcggggcggggtatccccgtctgagacgatgagctacgcaaacacggcaataacgacgctgggcgctgcccagaatagttgttgcaaggcgaaggtgagcaaagat

SEQ ID NO: 18022 - RNA, 137 nt, Aliiroseovarius halocynthiae
  source 1..137: mol_type = other RNA; note = Related to VICH01000004.1
tcaaggaccgcttgttttctcaatgaatcaagcaggttggggcatccccaactttacctatgacctctgcatacacggcatcaccgacactgggcttcgcccagcacaggtgacgcaagaccgagattggcttgagt

SEQ ID NO: 18023 - RNA, 137 nt, unidentified
  source 1..137: mol_type = other RNA; note = Related to JABDJG010000107.1; note = Hyphomicrobiales bacterium
ctttggatggctctttgcagcaatgtaaagagtggggcggggtatccccgcctgcgacgaccaccaagccaaacacggcgctaccgacgctgggctacgcccagtaccggtaacgcgagaccgaggaaagctgagac

SEQ ID NO: 18024 - RNA, 137 nt, unidentified
  source 1..137: mol_type = other RNA; note = Related to JAGRLY010000042.1; note = Alphaproteobacteria bacterium
ctttggataacgctgtgcagaaatgtgcagggttgggcggggcatccccgcctgcgacgacgacctgagcatacaaggcgttaccgccgctgggcttcacccaggtggggtaacgcgaaacgaagatgagcaaagac

SEQ ID NO: 18025 - RNA, 140 nt, unidentified
  source 1..140: mol_type = other RNA; note = Related to NZ_JAEHHL010000001.1; note = Proposed Thermohalobaculum xanthum
catgggttggccggggtcgcgagacccgagggcccgggcggggcatccccgcccgacgaccaagacctggcaagacgtggcatgcccgtccgtgggcgcaggcccacgcaggggcatgcgggaccgagtgaggccatgac

SEQ ID NO: 18026 - RNA, 135 nt, Cognatiyoonia koreensis
  source 1..135: mol_type = other RNA; note = Related to NZ_FOIZ01000001.1
ctctggaatgatgcgcctgcatggcacatcggggcggggtatccccgtctgagagaacgacctgcacatcacatggcctgaacgtctctgggtttcacccagtgccgttccagcatgacaagaaggagcagagac

SEQ ID NO: 18027 - RNA, 134 nt, Litoreibacter roseus
  source 1..134: mol_type = other RNA; note = Related to NZ_BLJE01000002.1
ctttggattggtgcaccttttggtgagcctggggcggggtatccccgtctgatgacattgctccgacacactgtggatatccgccactgagtttcactcaggacgggatatccaaagcacagaatagcagaggt

SEQ ID NO: 18028 - RNA, 128 nt, Yoonia sp.
  source 1..128: mol_type = other RNA; note = Related to JACXGQ010000004.1
ctctggctggtgtctttgataccaagggcggggtatccccgcctgaccaaacgacctttgcatacacggcatcaccgtgactgggcgttacccagtcctggtgacgcgcgaccaagaaaggcagagat

SEQ ID NO: 18029 - RNA, 127 nt, Yoonia maritima
  source 1..127: mol_type = other RNA; note = Related to NZ_PKFN01000009.1
ctctggttggcgcttcacggcaccggggcggggcatccccgcctaacttaccacctttgcatacacggcatcaccgttactgggcgcagcccagcgcgggtgatgcgcgaccaagaaaggcagagat

SEQ ID NO: 18030 - RNA, 130 nt, Paenihalocynthiibacter styelae
  source 1..130: mol_type = other RNA; note = Related to NZ_JADCKQ010000007.1
ttccggaacgtgcccgttaagggtgcagggcggggtatccccgtctgattttaatacgatgcaattcggggcgcgccggcgcgtgggctttcacccacctcccggcacgcagaaccaggttggcggaaat

SEQ ID NO: 18031 - RNA, 129 nt, Roseovarius aestuarii
  source 1..129: mol_type = other RNA; note = Related to FWXB01000002.1
tccaagccgccggagaaattcggccggatggggcttccccatcttactaccgttacgctggacattcggcgcatgaccgccactgggcttcgcccaggaccggtcatgcaggacacgacaggttggggt

SEQ ID NO: 18032 - RNA, 130 nt, unidentified
  source 1..130: mol_type = other RNA; note = Related to DQCI01000287.1; note = Rhodobacteraceae bacterium
cccaagacgccggagcaattcggccgggcggggtttccccgccctcgcatccgtcagactggacattcggcgcatgaccgccgctgggcttcacccaggaccggtcatgcaggacacgacaagttggggc

SEQ ID NO: 18033 - RNA, 127 nt, Actibacterium ureilyticum
  source 1..127: mol_type = other RNA; note = Related to NZ_NSBT01000024.1
ctcaagcggccgcgcaaccggccgggcggggcttccccgcccaaatctcgttacactggacattcggcgcatgaccgggactgggctgcacccagtgcgggtcatgcaggacacgacaggttgaggc

SEQ ID NO: 18034 - RNA, 128 nt, Gemmobacter tilapiae
  source 1..128: mol_type = other RNA; note = Related to NZ_BMYJ01000004.1
ttcaaggggtggagcgatccacagggccggggcttccccggccagacgatcccagttggaacattcgacgcgtggaactccctgggccttacccagagctttccacgcaggacaggaaaggttgaacc

SEQ ID NO: 18035 - RNA, 128 nt, Pseudorhodobacter sp.
  source 1..128: mol_type = other RNA; note = Related to NKIU01000001.1
gtcaagacgccgggcatcccggctgggcggggcttccccgcccatctttcgcacgttgtgacattcgacgcatggccttgcctgaacatcattcagatccggccatgcaggacaggtgaggttgaccc

SEQ ID NO: 18036 - RNA, 127 nt, Rhodobacter sp.
  source 1..127: mol_type = other RNA; note = Related to JADJTJ010000002.1
gccaagatgccggatctccggccgggcggggcttccccgtcccattcgacgcaagttgcacattcgacgcatgaccgggcctgggcttcacccagatcaggtcatgcaggactggtgaggttggccc

SEQ ID NO: 18037 - RNA, 126 nt, Gemmobacter serpentinus
  source 1..126: mol_type = other RNA; note = Related to NZ_WCHR01000012.1
gccaagcgccgggcaaccggaggggtggggcttccccacccgaaaaacgcaacgccagacattcgacgcaaggacggcgccgggctctgcccgggtcagtccttgcaggaccagagaggttggacc

SEQ ID NO: 18038 - RNA, 126 nt, Gemmobacter caeruleus
  source 1..126: mol_type = other RNA; note = Related to NZ_VKKX01000051.1
accaagcgccgggcaaccggaggggcggggcttccccgcccgcatcgcatcacgcctgacattcgacgcatggccgtcgccgggcgccacccgggccgggccatgcaggaccagagaggttggcgc

SEQ ID NO: 18039 - RNA, 126 nt, Exiguobacterium profundum
  source 1..126: mol_type = other RNA; note = Related to CP059262.1
gtcaagatgccgggaaaccggtcgggcgggcttcccgacccgcagcacgcaaggccgccgattcgacgcaggaccgtccccgggcttcacccggaccgggtcctgcaggaccagagaggttgaccc

SEQ ID NO: 18040 - RNA, 131 nt, Ruegeria sp.
  source 1..131: mol_type = other RNA; note = Related to NZ_WQIE01000002.1
ctcaagaccgtgggcaaccacattctgcggggtttccccgtggcttacgacctgactgcatacattcggcgcatgacccaggcttgccgttggcaaggacaggtcatgccgaacagagatatggttgaggg

SEQ ID NO: 18041 - RNA, 133 nt, Shimia sediminis
  source 1..133: mol_type = other RNA; note = Related to NZ_RYZK01000009.1
ttcaagacttttgggttctacccaaatttggcggggcatccccgtcgcaaacaacgttaccttggccattcggcgcaaaaccctgactgggcttcacccagcgcaggttgtgccagacatgtgaggttgaaag

SEQ ID NO: 18042 - RNA, 134 nt, Sulfitobacter algicola
  source 1..134: mol_type = other RNA; note = Related to NZ_JABUFE010000011.1
cttaagatatcggggccttgtcccgaccgggtggggcttccccatccgaaccaaccttacttgcagcattcggcgcaaaggcttgattgggcgctgcccaaggcagcctttgccagtccagatcaggttaagcg

SEQ ID NO: 18043 - RNA, 143 nt, Pleomorphomonas sp.
  source 1..143: mol_type = other RNA; note = Related to NZ_JAKJIC010000019.1
gtcaagatactcccgtcatcgcgtgcgatgggggagagctgcggggttaccccgcggcagccttgttacctggacacttccgccgcatgaacagcactgggctctgcccaggaccgctcatgcaggacatgtagggttgatcg

SEQ ID NO: 18044 - RNA, 139 nt, unidentified
  source 1..139: mol_type = other RNA; note = Related to JAIENJ010000270.1; note = Parvularculaceae bacterium
ttcaagcattctcgcaacgcgcgcgttgtcgagatcttcggggcaaccccgggggcaagttattatctgcacagcacgctgcgtgacccgccgaaggctttgcctacccaaggtcacgccaaaccagacgagttgaagc

SEQ ID NO: 18045 - RNA, 140 nt, unidentified
  source 1..140: mol_type = other RNA; note = Related to JAEUMS010000015.1; note = Hyphomonadaceae bacterium
ttcaagcaatcccggaaacgttcgcgttgacgggatcttcggggataccccgaggacttcttgttttccgcacagagcgctgcgtgacgcgcggcaggctttgcctgcgttacgtcacgccaaaccagttgagttgaagt

SEQ ID NO: 18046 - RNA, 131 nt, unidentified
  source 1..131: mol_type = other RNA; note = Related to JAEUMQ010000004.1; note = Hyphomonadaceae bacterium
ttcaagcttcccggcgaaagcttgggatctctggggctaccccaggggctcatcgaactcggaccatacgttgcgtgatccccggtaggctgtgcctacgttcgatcacgccagacaagacgcgttggagc

SEQ ID NO: 18047 - RNA, 137 nt, Acidisphaera sp.
  source 1..137: mol_type = other RNA; note = Related to NZ_LMUJ01000042.1
tccaagcaatccctgacaccgaatcagggatcttcggggcaaccccggggttagtcgcgtttccaaggcagaacgttgcatggacgtgggtaggcttccgcctacggtcggccatgccggacgggttgggttggaag

SEQ ID NO: 18048 - RNA, 135 nt, unidentified
  source 1..135: mol_type = other RNA; note = Related to JADLHI010000158.1; note = Hyphomonadaceae bacterium
ctcaagcactccggtgcggctagcatcggacctccggggttaccccggggaggcattcacacctgagcatcacgcagcacggtacgcggtgggctctacccacgatataccgcgcataacaagaggggttggggc

SEQ ID NO: 18049 - RNA, 146 nt, unidentified
  source 1..146: mol_type = other RNA; note = Related to JADFVY010000399.1; note = Proteobacteria bacterium
ttcaagcaagtcctggcgatgcatcgcaagacggccgggactctccggggttaccccgggggacgaacgttactctgccattgccgtgcatgacccccttcaggcttcgcctgagacaggtcatgcgtgacgagacgggttgaagg

SEQ ID NO: 18050 - RNA, 147 nt, Hyphomicrobium sp.
  source 1..147: mol_type = other RNA; note = Related to JAEUME010000009.1
ttcaagacaggcccggtcggtcacttcggtgccgtcgggtctctttggggttaccccaaggatatttcactattgtgctcagcccgcaacgcgatgccgggtaggtccgccctacgttacatcgcgtccgacacgttgggttgaagt

SEQ ID NO: 18051 - RNA, 147 nt, unidentified
  source 1..147: mol_type = other RNA; note = Related to JACMJQ010000424.1; note = Chitinophagales bacterium
ctcaagcaatcttcatgatgcgtttctgacgctattggagatctctggtgataccccaggggagactttttactcaggcaactcacggcatgatgcgcggtaggcctttgcctacatgtcatcaagcttcatacgacgggttgaggc

SEQ ID NO: 18052 - RNA, 145 nt, unidentified
  source 1..145: mol_type = other RNA; note = Related to JABFRX010000116.1; note = Alphaproteobacteria bacterium
ttcaagacttctccatgcggcttcggccggagggagatctctggggttaccccaggggacagaatggacgccagtaagacgcggcataggccgcgctgggcacgtcgcccagaatagcctacgcatcacgacgacaggttgaagc

SEQ ID NO: 18053 - RNA, 145 nt, unidentified
  source 1..145: mol_type = other RNA; note = Related to JAIOQG010000119.1; note = Alphaproteobacteria bacterium
ttcaagactccctgacgctgcacttcggttcagccagggaactccggggttaccccggggaacattcacaacgccagaaagacgtcgcataaccctcgctgggctgcacccagggccggttatgcctcacatgatgggttgaagt

SEQ ID NO: 18054 - RNA, 144 nt, unidentified
  source 1..144: mol_type = other RNA; note = Related to JAEUML010000192.1; note = Alphaproteobacteria bacterium
ttcaagacttctccgattgagcctcggttcggacggagatctctggggctaccccaggggaaatctcatacgcagtgaagacacggcgaaacgcacggtgggctacacccacataccgttttgcatgacgcgacgggttgaagc

SEQ ID NO: 18055 - RNA, 138 nt, unidentified
  source 1..138: mol_type = other RNA; note = Related to JADMJM010000043.1; note = Hyphomonadaceae bacterium
ttcaagaatgtcggtgcatttcgatgcgcggacgcttcggggttaccccgaaggagaactgtagccaacacaatacgttgcacgatgcgcggcaggcttcgcctgcaacccatcgagcctctctcgtttggttgaagc

SEQ ID NO: 18056 - RNA, 135 nt, unidentified
  source 1..135: mol_type = other RNA; note = Related to JAFECD010000003.1; note = Proteobacteria bacterium
gccaagcagtcctgggcaaccgggactctctggggctaccccaggggcattgatgacctcacgcagaacgcagcgaagagttccggtccgctccgccggacctgggctcctcgccagacacggtcgggttggcgc

SEQ ID NO: 18057 - RNA, 133 nt, Hyphomicrobium sp.
  source 1..133: mol_type = other RNA; note = Related to JABFRT010000004.1
gctaagaactcctgggaaaccgggactctctggggttaccccaggggacaatatcaccacacgcacgacgcagcgtgggcctcgggtaggcagaacctaccggctgcccacgcaagacacggtaggttggcgc

SEQ ID NO: 18058 - RNA, 147 nt, unidentified
  source 1..147: mol_type = other RNA; note = Related to JAEUMD010000019.1; note = Hyphomicrobiaceae bacterium
ctcaagccgagaacgatgcttcatgccttggagcgtcgtgcctccggggctaccccgggggcgtgaattctaccccagcattcggcggcgtgatgcccggacgcctcgcggcgtcgaagcatcacgcaagacgtgattggttggggc

SEQ ID NO: 18059 - RNA, 145 nt, unidentified
  source 1..145: mol_type = other RNA; note = Related to JADKAD010000001.1; note = Deltaproteobacteria bacterium
cccgagctggtccacgcgacctccgtggggcaaccccacggcatcgtacttgcctcgtcactcggggggagacggaccgccgggatcgctcccggcgcgcgcctgtcggcgcttcacgtctcccagcacggagattcgtcgggcg

SEQ ID NO: 18060 - RNA, 138 nt, unidentified
  source 1..138: mol_type = other RNA; note = Related to JACMJN010001335.1; note = Deltaproteobacteria bacterium
accgaagcctaggcgtttcgacgccgcttccggggttaccccggggagaacctctcgacccgatcatcacggagcatgaccccgctccgcctgcgccctgcgcaggactggtcatgccgtagcggagcacgtcggtcg

SEQ ID NO: 18061 - RNA, 134 nt, Gordonia lacunae
  source 1..134: mol_type = other RNA; note = Related to NZ_NGFO01000034.1
ggtgagaggggatcgtcgcgatccgtctcaggggtaacccctgggtgcacttcacagttggttcctgcgtccgacgccggcgcgcacgcttcacgtgccacccggcgccgttgcaccacagctctggtcaccac

SEQ ID NO: 18062 - RNA, 131 nt, Gordonia hongkongensis
  source 1..131: mol_type = other RNA; note = Related to NZ_CP095552.1
ggtgagagtggatcgtcgcgatccgtctcaggggtaacccctgggtgcacttcacagctggtccctgcgtccgacgccggcgcgcacgctgcacgtgccacacggcgccgctgcacagttctggtcacccc

SEQ ID NO: 18063 - RNA, 134 nt, Gordonia sp.
  source 1..134: mol_type = other RNA; note = Related to NZ_JAKOIW010000003.1
ggtgagaggggatcgtttcgatccgtctcaggggtaacccctgggtgcagtccacagttggttcctgcgtccgacgccggcccgcacgctgcacgtgctccacggcgccgcggcaccacggttctggtcaccac

SEQ ID NO: 18064 - RNA, 134 nt, Gordonia sp.
  source 1..134: mol_type = other RNA; note = Related to RKME01000013.1
ggtgagagtggatcgtttcgatccgtctcaggggtaacccctgggtgcagttcacagttggttcctgcgtccgacgccggcgcgcacgctgcacgtgccacccggcgccgcgacaccaccgttctggtcgccac

SEQ ID NO: 18065 - RNA, 134 nt, Rhodococcus sp.
  source 1..134: mol_type = other RNA; note = Related to NZ_SLVY01000022.1
ggtgagagcggatcgtttcggtccgtctcaggggaaacccctgggtacagttcacagttggttcctgcgtccgacgccgcaccgcacgctgcgcgtgccgaacggcgccgcgaccacgaggttcaggtcacctc

SEQ ID NO: 18066 - RNA, 134 nt, Williamsia sterculiae
  source 1..134: mol_type = other RNA; note = Related to NZ_FTNT01000002.1
ggtgagagtggatcgtcacgatccgtctcaggggtaacccctgggtgcacctcacagttggtccctgcgtccgacgccggccggcacgctgcgcgtgcaccacggcgccgcgagaacgagttctgggtcaccgc

SEQ ID NO: 18067 - RNA, 134 nt, Gordonia desulfuricans
  source 1..134: mol_type = other RNA; note = Related to JAADZU010000055.1
ggtgagaggggatcggttcgatccgtctcaggggaaacccctgggtacatgtcacagttggttcctgcgtccggcgccacacggcacgctccgcgtgcgacccggcgccgcggcactgcgttctgggtcactgc

SEQ ID NO: 18068 - RNA, 131 nt, Gordonia polyisoprenivorans
  source 1..131: mol_type = other RNA; note = Related to CP003119.1
ggtgagaggggatcggttcgatccgtctcaggggtaacccctgggtacagttcacagttgggccctgcgtccgacgccgtgcagcacgctgcacgtgcaggccggcgccgcatcaaggttctggtcaccac

SEQ ID NO: 18069 - RNA, 132 nt, Gordonia sputi
  source 1..132: mol_type = other RNA; note = Related to BAFC01000046.1
ggtgagagtggatcgagagatccgtctcaggggcaacccctgggtacacatcacagttggttcctgcgtccgacgccgctccgcacgctgcgcgtgccagccggcgacgagtactcggctcgtggtcacccc

SEQ ID NO: 18070 - RNA, 129 nt, Gordonia aichiensis
  source 1..129: mol_type = other RNA; note = Related to NZ_BANR01000005.1
ggtgagagtggatcgagagatccgtcccaggggcaacccctgggtacatgtgacagttggttcctgcgtccgacgccggtccgcacgctgcgcgtgccgggcggcgacgagcactcggctcgtggtcac

SEQ ID NO: 18071 - RNA, 132 nt, Gordonia otitidis
  source 1..132: mol_type = other RNA; note = Related to NZ_CP085974.1
ggtgagtgtggatcgagagatccgtctcaggggcaacccctgggtacatgtcacagttggttcctgcgtccgacgccgctccgcacgctgcgcgtgccagacggcgacgagtgttcggctcgtggtcgcccc

SEQ ID NO: 18072 - RNA, 134 nt, Gordonia soli
  source 1..134: mol_type = other RNA; note = Related to NZ_BANX01000005.1
ggtgagggtggatcggtccgatccgtctcaggggtaacccctgggttcatcacacagttggtccctgcgtccgacgccacgccgcacgctgcgcgtgctacccggcgccgcgatcacgcgttcgaggtcaccgc

SEQ ID NO: 18073 - RNA, 134 nt, Dietzia alimentaria
  source 1..134: mol_type = other RNA; note = Related to NZ_AGFF01000003.1
ggtgagagtggatcgatccgatccgtctcaggggcaacccctgggtacacatcacagcaagttcctgcgtccggtgccgcacggcacgctccgcgtgcgcaacggcaccgccaagacgagttccaggtcacctc

SEQ ID NO: 18074 - RNA, 134 nt, Dietzia sp.
  source 1..134: mol_type = other RNA; note = Related to NZ_CP046569.1
ggtgagagtggatcgatccgatccgtctcaggggcaacccctgggtacacatcacagcaagttcctgcgtccggtgccgcacggcacgctccgcgtgcgcaacggcaccgccaagacgagctccaggtcacctc

SEQ ID NO: 18075 - RNA, 134 nt, Dietzia sp.
  source 1..134: mol_type = other RNA; note = Related to NZ_CP046567.1
ggtgagggtggatcgatccgatccgtctcaggggcaacccctgggtgcacatcacagcgagacactgcgtccggcgccgtgcggcacgctccgcgtgcgcgacggcaccgcagagacgaacgtcgggtcacctc

SEQ ID NO: 18076 - RNA, 134 nt, Dietzia natronolimnaea
  source 1..134: mol_type = other RNA; note = Related to NZ_NTGA01000019.1
ggtgagagtggatcgatccgatccgtctcaggggcaacccctgggtgcacatcacagcgagaccctgcgtctggtgtcgcgcggcacgctccgcgtgcaggacgacaccaccagaacgagcgtcaggtcgcctc

SEQ ID NO: 18077 - RNA, 134 nt, unidentified
  source 1..134: mol_type = other RNA; note = Related to DWWP01000013.1; note = Candidatus Dietzia intestinipullorum
ggcgagagtggatcgatcctatccgtcccaggggcaacccctgggtgcacatcacagcgagttcctgcgtccggagccgccgggcacgctccgcgtgcgacccggcaccgccgagacgagttcccggtcgcctc

SEQ ID NO: 18078 - RNA, 134 nt, Dietzia aurantiaca
  source 1..134: mol_type = other RNA; note = Related to NZ_JAIFXZ010000017.1
ggcgagagtggatcgatccgatccgtctcaggggcaacccctgggtacacatcacagttagttcctgcgtccggtgccgcacggcacgctccgcgtgcgaatcggcaccgccgagacgagttcagggtcgcctc

SEQ ID NO: 18079 - RNA, 134 nt, unidentified
  source 1..134: mol_type = other RNA; note = Related to DWWG01000159.1; note = Candidatus Dietzia intestinigallinarum
ggcgagagtggatcgattcgatccgtctcaggggcaacccctgggtgcacatcacaaccgggcactgcgtccggagccgcacggcacgctccgcgtgcgcatcggcaccgccgagacgagttcagggtcgcctc

SEQ ID NO: 18080 - RNA, 134 nt, unidentified
  source 1..134: mol_type = other RNA; note = Related to DXGN01000154.1; note = Candidatus Dietzia merdigallinarum
ggcgagagtggatcgatccgatccgtctcaggggcaacccctgggtacacaccacagctggcatctgcgtccggtgccgcacggcacgcttcgcgtgcgaatcggcaccgccgagacgagttcagggtcgcctc

SEQ ID NO: 18081 - RNA, 132 nt, Gordonia sp.
  source 1..132: mol_type = other RNA; note = Related to JAKWBF010000007.1
ggcgagagtggatcaatcgatccgtctcaggggcaacccctgggtacattccacagttggtctctgcgtccgacgccggacggcacgcttcgcgtgcttcacggcgccgctgctgcacgttccggtcatccc

SEQ ID NO: 18082 - RNA, 133 nt, Gordonia amarae
  source 1..133: mol_type = other RNA; note = Related to CP045804.1
tgtgagagtggatcgagagatccgtctcaggggtaacccctgggtgcagttcacagcaagaccccgcggccggagccacgccgcacgctgtgcgtgccggatggcaccgcgaacaccggtgtgaggtcacagc

SEQ ID NO: 18083 - RNA, 133 nt, Williamsia phyllosphaerae
  source 1..133: mol_type = other RNA; note = Related to NZ_BMCS01000002.1
gatgagagtgggtcgtcacgacccgtctcaggggtaacccctgggtacacctcacagttggtccctgcgtccgacgccatgcggcacgctgcgcgtgcttcgcggcgccgcgatacgagttctcggtcacctc

SEQ ID NO: 18084 - RNA, 133 nt, Williamsia muralis
  source 1..133: mol_type = other RNA; note = Related to NZ_RBKV01000001.1
ggcgagagtgggttctccgaacccgtctcaggggcaacccctgggtacatctcacagttggtatcagcgtccgacgccggcaggcacgctccgcgtgctacacggcgccgcagacgagagttctggtcgcccc

SEQ ID NO: 18085 - RNA, 134 nt, Williamsia soli
  source 1..134: mol_type = other RNA; note = Related to NZ_JAFRDR010000008.1
ggtgagagtgggttcttcgaacccgtctcaggggcaacccctgggtacatctcgcagttggtatcagcgtccgacgccgctccgcacgctccgcgtgccagccggcgccgccgacacaagctcgtggtcacctc

SEQ ID NO: 18086 - RNA, 132 nt, Gordonia phthalatica
  source 1..132: mol_type = other RNA; note = Related to NZ_CP011853.1
tgcgagaggggtcgatcgacccgtctcgggggctacccccgggtgcatccacggtgagttctcgcgtcgcgcgcaggacggcacactccgtgtgcgccactgcgcgccgatgacgacaggtctggtcgcacc

SEQ ID NO: 18087 - RNA, 138 nt, Gordonia sp.
  source 1..138: mol_type = other RNA; note = Related to JAAYXO010000187.1
cgggagggcggtgcgagaggggtctctcgatccgtctcaggggctacccctgggtgcattcacagttcggcagtgcgtcgcgcgcaggccggcacactccgtgtgcgacactgcgcgccgaagacgacaagtctgggt

SEQ ID NO: 18088 - RNA, 132 nt, Gordonia malaquae
  source 1..132: mol_type = other RNA; note = Related to BAOP01000031.1
cgcgagagggatcgatgatccgtctcaggggctacccctgggttcatgcactgcacggcaccgcgtcgcacgcaggtcggcacacttcgtgtgcttcactgcgcgccgaggacgacaagtccaggtcgcgtc

SEQ ID NO: 18089 - RNA, 132 nt, Gordonia humi
  source 1..132: mol_type = other RNA; note = Related to NZ_JACIFP010000001.1
cgcgagagggatcgatgatccgtctcaggggcatcccctgggttcatgcacggcacggcttcgcgtcgcgcgcagacgggcacactccgtgtacggcgctgcgcgccgagaacgacatgttctggtcgcgcc

SEQ ID NO: 18090 - RNA, 138 nt, Gordonia asplenii
  source 1..138: mol_type = other RNA; note = Related to NZ_JABBNB010000006.1
gacgagagcgggggatcgcgagatcctcggtctcaggggctacccctgggttcatgcacagcgtgacatcacgtcccgcgcagccgagcacactgcgtgtgcaaccctgcgcggcggacgacaggtttcggtcgtccc

SEQ ID NO: 18091 - RNA, 134 nt, Williamsia sp.
  source 1..134: mol_type = other RNA; note = Related to JAHCSG010000002.1
ggtgagagtggatcctcgcgatccgtctcaggggcaacccctgggttcagaccacagctacaccctgcgtccgacgccaccgggcacgctgcgcgtgcttcatggcgccgcgatgacgagttgacggtcaccct

SEQ ID NO: 18092 - RNA, 133 nt, Williamsia herbipolensis
  source 1..133: mol_type = other RNA; note = Related to NZ_JXYP01000014.1
gacgagaacggggtgacacacccgtctcaggggcaacccctgggtacaccacacagcgagaccctgcgtccgacgccggaccgcacgctgcgcgtgcatcgcggcgccgaggacaggagaattcggtcgactc

SEQ ID NO: 18093 - RNA, 134 nt, Nakamurella lactea
  source 1..134: mol_type = other RNA; note = Related to NZ_AUFT01000012.1
ggcgagagtgggtcgatgcgacccgtctcaggggtaacccctgggtgcagttcacagttggtatcagcgtccgacgccggaccacatgcttcgcgtgtccggcggcgccgcggacaggtgcggttggtcgcccc

SEQ ID NO: 18094 - RNA, 141 nt, Nakamurella aerolata
  source 1..141: mol_type = other RNA; note = Related to JABEND010000002.1
ggcgagaacgggtacggcatcgctgtgccctggtcaggggaaacccctggcgaggcgagacagttgcaccacgcatccggcgccgccgcggcccgctccgcgggcgaaggggcgccgcgaacagcaggaactggtcgaccc

SEQ ID NO: 18095 - RNA, 134 nt, Tsukamurella tyrosinosolvens
  source 1..134: mol_type = other RNA; note = Related to NZ_CP070357.1
ggtgaggtgggatccgcgagatccgtcccagcggtaaccgctgggggcactgcacagttacaccctgcgtcccacgccggcgcgtgcgctccgcgcaccacacggcgctccggggccttgttccaggtcacccg

SEQ ID NO: 18096 - RNA, 134 nt, Tsukamurella conjunctivitidis
  source 1..134: mol_type = other RNA; note = Related to NZ_VIGX01000010.1
ggtgaggcgggatccgcgcgatccgtcccagcggtaaccgctgggagcactgcacagtcactccctgcgtcccgcgccggcctgtgcgcttcgcgcacctcgcggcgctccgggactctgttccaggtcacccg

SEQ ID NO: 18097 - RNA, 134 nt, Tsukamurella pulmonis
  source 1..134: mol_type = other RNA; note = Related to NZ_UHII01000001.1
ggtgaggtgggatccacgcgatccgtctcagcggcaaccgctgggggcactgcacagtcacaccccgcgtcccacgccggacggtgcgctgcgcgcacgcgacggcgctccgggaacatgtttcaggtcacccg

SEQ ID NO: 18098 - RNA, 134 nt, Tsukamurella sp.
  source 1..134: mol_type = other RNA; note = Related to JAIULG010000072.1
ggcgaggagggatcctcgcgatccgtcccagcggtaaccgctgggggcaccgcacagtcacaccctgcgtcccacgccggcgcgtgcgctgcgcgcaccacacggcgctccgggaccttgttccaggtcacccg

SEQ ID NO: 18099 - RNA, 134 nt, Tsukamurella sp.
  source 1..134: mol_type = other RNA; note = Related to AP025688.1
ggtgaggcgggatccatgcgatccgtcccagcggtaaccgctgggggctctgcacagctacacctcgcgtcccacgccggtcagtgcgctgcgcgcaccagacggcgctccgggaactcgttccaggtcacccg

SEQ ID NO: 18100 - RNA, 134 nt, Tsukamurella pseudospumae
  source 1..134: mol_type = other RNA; note = Related to NZ_LSRF01000001.1
ggtgaggtgggatccttgcgatccgtcccagcggcaaccgctgggggctctgcacagttacaccccgcgtcccacgccggtccgtgcgctccgcgcaccgggcggcgctccgggcgagtgtttcaggtcacccg

SEQ ID NO: 18101 - RNA, 134 nt, Tsukamurella paurometabola
  source 1..134: mol_type = other RNA; note = Related to CP001966.1
ggggaggcgggatccgcgcgatccatcccagcggtaaccgctgggcgcaccacacggctacaccacgcgtcccacgccggacggggcgctacgcgccctcctcggcgctgcgggcgactgtttcaggtccgccg

SEQ ID NO: 18102 - RNA, 134 nt, Tsukamurella sp.
  source 1..134: mol_type = other RNA; note = Related to BPMV01000001.1
ggggaggcgggatccgcgcgatccatcccagcggtaaccgctgggtgcaccacacggctacacctcgcgtcccacgccggcccgggcgcttcgcgcccctcgcggcgctgtgggcgattgtttctggtcacccg

SEQ ID NO: 18103 - RNA, 147 nt, Rhodococcus koreensis
  source 1..147: mol_type = other RNA; note = Related to NZ_CP070609.1
ggtgagagtggtgtggccggttcgccgaccgcgaccacgtcaggggtaacccctggctcgacagtgttcaccggagacaccgtccgacgcgcgaccgcatgctccgcgtgctccggcgcgccgcagacgacaggtatcggtcacctc

SEQ ID NO: 18104 - RNA, 147 nt, Rhodococcus opacus
  source 1..147: mol_type = other RNA; note = Related to CP003949.1
ggtgagagtggtgtggccggttcgccggccgcgaccacgtcaggggaaacccctggctcgacagtgttcatcggagacaccgtccgacgcgcgaccgtatgctccgcgtgcttcggcgcgccgcagacgacagatatcggtcacctc

SEQ ID NO: 18105 - RNA, 147 nt, Rhodococcus sp.
  source 1..147: mol_type = other RNA; note = Related to NZ_CP058638.1
ggtgagagtggggtggccggtacgccggctgcgaccacgtcaggggtaacccctggctcggcattgttcaccggaggcaccgtccgacgcacgaccgcacgctccgcgtgcttcggcgcgccgcagacgacaggtatcggtcgcctc

SEQ ID NO: 18106 - RNA, 145 nt, Rhodococcus cavernicola
  source 1..145: mol_type = other RNA; note = Related to NZ_VLNY01000005.1
ggcgagtggtgcagccggttcgccggttgtggccgcgtcaggggtaacccctggcttgtcagtatcagccggacgcaccgtccgacgcacgaccgcacgcttcgcgtgcctgagtgcgccgcagacgacagttatcggtcgcccc

SEQ ID NO: 18107 - RNA, 141 nt, Hoyosella altamirensis
  source 1..141: mol_type = other RNA; note = Related to JACHWS010000003.1
cgcgagagtgggagggctgtcgccctttccatgtccggggtaaccccgggctgcgcgttgcaagttgggcacatcgtccgacgcacttcggcacgctccgcgtgcgcccgtgcgccgctgacgacaggttatggtcgcgcc

SEQ ID NO: 18108 - RNA, 141 nt, Rhodococcus rhodnii
  source 1..141: mol_type = other RNA; note = Related to NZ_QRCM01000001.1
cgcgagagcggatcggccgattcgtcggcacgatccgggtcaggggcaacccctggcacacggatatcggcagggcacaccgtccgacgcactcccgcgcgctccgcgcgccaccgtgcgccgcagacgacaggtctcggt

SEQ ID NO: 18109 - RNA, 138 nt, Nocardia mangyaensis
  source 1..138: mol_type = other RNA; note = Related to NZ_CP018082.1
agcgagagtggggttgaaaggcgacccatctcaggggtaacccctgggggcttcttgtcggttgggtacagcgtccggagcaagggcgcacgcttcgcgtgcagcgcagcaccgtggacgaaggattctggtcgctcc

SEQ ID NO: 18110 - RNA, 135 nt, Nocardia salmonicida
  source 1..135: mol_type = other RNA; note = Related to NZ_BDBG01000003.1
ggcgagagcgggtcgggtcgacccacctcaggggtaacccctgggagcgtcttgtcagttgggctcagcgtccggagcaagggcgcacgcttcgcgtgcctcgcagcaccgcggacgaaggattctggtcgcccc

SEQ ID NO: 18111 - RNA, 135 nt, Nocardia sp.
  source 1..135: mol_type = other RNA; note = Related to NZ_JACVEE010000002.1
ggcgagtgtgggtcgatgcgacccgtctcaggggtaacccctgggtcaggcaggtcagttgggcacagcgtccgaaaccacagggcacgctccgcgtgcatcttggtacgaaggacgaagggttctggtcgcctc

SEQ ID NO: 18112 - RNA, 135 nt, Nocardia goodfellowii
  source 1..135: mol_type = other RNA; note = Related to NZ_JAGGMR010000001.1
ggcgagagtgggtcgaagcgacccgtctcaggggaaacccctgggtcaggcagatcagttgggcacagcgtccgaaaccaccgggcacgctccgcgtgcgtcctggtacggaggacgaagggttctggtcgcctc

SEQ ID NO: 18113 - RNA, 135 nt, Nocardia thailandica
  source 1..135: mol_type = other RNA; note = Related to NZ_BAGK01000206.1
ggtgagagcgggtcggtaggacccacctcaggggcaacccctgggaacgacacatcgatcgggtacagcgtccggagccggcgcgcacgcaccgagtgcctcgcggcaccgcggacgagagatttcggtcgccac

SEQ ID NO: 18114 - RNA, 135 nt, Nocardia altamirensis
  source 1..135: mol_type = other RNA; note = Related to NZ_BDAY01000016.1
ggcgagagtgggtcgatcgggcccgtctcaggggtaacccctgggggcatttcagcagttgggttcagcgtccgaagccgctccgcacgctccgcgtgccggccggcgccgaggacgagagattgtggtcgcccc

SEQ ID NO: 18115 - RNA, 135 nt, Antrihabitans stalagmiti
  source 1..135: mol_type = other RNA; note = Related to NZ_JAEMNV010000003.1
ggcgagagtgggtcgatcggacccgtctcaggggcaacccctgggtatgacagatcagttgggcactgcgtccgaagccggcccgcgcgctccgcgcgcatcgcggcgccgaggacgaaggattcaggtcgcccc

SEQ ID NO: 18116 - RNA, 132 nt, Smaragdicoccus niigatensis
  source 1..132: mol_type = other RNA; note = Related to NZ_BCRU01000034.1
ggtgagcgaggaccgagaaggtctgtctcaggggtaacccctgggtgcgtcgaatcagttggcaacagcgtccgaagccgctgggcacgctccgcgtgcggcccggcgacaaagacaagagcaggtcgtcgg

SEQ ID NO: 18117 - RNA, 135 nt, Skermania sp.
  source 1..135: mol_type = other RNA; note = Related to VLIY01000014.1
ggcgagcgtgggtcgatcaggccctcctcaggggcaacccctgggtgcacatcatcagttgggcacagcgtccggagccgctcggcgcgctgcgcgagctacacggcgccaaggacgatagtttttggtcgcccc

SEQ ID NO: 18118 - RNA, 136 nt, Rhodococcus corynebacterioides
  source 1..136: mol_type = other RNA; note = Related to JAFBBK010000001.1
ggcgagagtgggtcctgcgcgaccctcctcgagggcaaccctcgggaacgatcacggaatcgggcactgcgtccgacgcacctcggcacgctccgcgtgctggagcgcgacgacgacgagagtctcaggtcgcctc

SEQ ID NO: 18119 - RNA, 136 nt, Rhodococcus sp.
  source 1..136: mol_type = other RNA; note = Related to LMRP01000002.1
ggcgagagtgggtcctgcgagacccgactcgagggaaaccctcgggaacattcacagaaccggtcactgcttccgacgcgcccgagcacgctccgcgtgcctccgcgcgacgacgacgacagtcttcggtcgcccc

SEQ ID NO: 18120 - RNA, 151 nt, Rhodococcus corynebacterioides
  source 1..151: mol_type = other RNA; note = Related to JABUBR010000003.1
ggcgagagtggggtcgaccggagttcgcggccggtcacccgtctcgggggcaacccccgggtacgagaacacagccgatcactgcgtccgacgcaggaatgcacgctccgcgtgctgcgctgcgccgccgacgggagagcatggtcgcccc

SEQ ID NO: 18121 - RNA, 142 nt, Rhodococcus trifolii
  source 1..142: mol_type = other RNA; note = Related to NZ_BMCU01000001.1
ggcgagagcgggtctgccaccatcgaggcccatctcaggggtaacccctggggcgaacatcttcatcggtcactgcgtccgaagcaggagtgcacgctccgcgtgctgcgctgctccgcggacggaagaagcaggtcgcccc

SEQ ID NO: 18122 - RNA, 135 nt, Rhodococcus sp.
  source 1..135: mol_type = other RNA; note = Related to NZ_CP032762.1
ggcgagagttggtccgctgggccgatcccaggggtaacccctgggcgagagagaagaactgggcactgcgtccgatgccggtccgcacgctccgcgtgcttgacggcgccgagtacgaaagattcaggtcgcccg

SEQ ID NO: 18123 - RNA, 135 nt, Rhodococcus sp.
  source 1..135: mol_type = other RNA; note = Related to NZ_NPFR01000010.1
ggcgagagtcggtccgctgggccgatctcaggggtaacccctgggcgagacagaagaactggtcactgcgtccgacgccggtccgcacgctccgcgtgctcggcggcgccgagtacacaagattcaggtcgcccg

SEQ ID NO: 18124 - RNA, 135 nt, Rhodococcus sp.
  source 1..135: mol_type = other RNA; note = Related to NZ_LVCV01000404.1
ggcgagtgtcggtccgcgcgaccgatctcaggggcaacccctgggtgggaaagaagaactgggcactgcgtccgacgccggtccgcacgctccgcgtgcacgacggcgccgagcacgaaagattcaggtcgcccg

SEQ ID NO: 18125 - RNA, 135 nt, Rhodococcus sp.
  source 1..135: mol_type = other RNA; note = Related to NZ_JABFAO010000002.1
ggtgagagttggtccgaagggccgatcccaggggcaacccctgggcgagaaagaagaactgggcactgcgtccgacgccgctccgcacgctccgcgtgcacgccggcgccgagtacgaaagattcaggtcacccg

SEQ ID NO: 18126 - RNA, 135 nt, Rhodococcus kyotonensis
  source 1..135: mol_type = other RNA; note = Related to LVHI01000032.1
ggcgagagttggtccgcgcgaccatcctcaggggtaacccctgggtgtgagagaacaaccggtcactgcgtccgacgccgctccgcacgctccgcgtgccagacggcgccgagtacgaaagtttcaggtcgcccg

SEQ ID NO: 18127 - RNA, 135 nt, Rhodococcus sp.
  source 1..135: mol_type = other RNA; note = Related to NZ_CP010797.1
ggcgagagttggtccgcgggaccggtctcaggggtaacccctgggtacatcacgagaatcgagcactgcgtccgaagctggtctgcacgctccgcgtgcttggcagctccgaggacgaaagatttcggtcgcccc

SEQ ID NO: 18128 - RNA, 135 nt, Rhodococcus sp.
  source 1..135: mol_type = other RNA; note = Related to NZ_JABFAU010000077.1
ggcgagagttggtccgtagggccggtctcaggggcaacccctgggtgcatcacgagaatcgatcactgcgtccgaagcagctctgcacgcttcgcgtgctcgactgctccgaggacgaaagatttcggtcgcccc

SEQ ID NO: 18129 - RNA, 135 nt, Rhodococcus fascians
  source 1..135: mol_type = other RNA; note = Related to CP015235.1
ggcgagagttggtccgcgggaccggtctcaggggtaacccctgggtacatattgagaatcgagcactgcgtccgaagcagctccgcacgctacgcgtgcccgactgctccgaggacgaaagatttcggtcgcctc

SEQ ID NO: 18130 - RNA, 135 nt, Rhodococcus sp.
  source 1..135: mol_type = other RNA; note = Related to NZ_CP039254.1
ggcgagagttggtccgtgcgaccaagctcaggggtaacccctgggagagaattgagaatcggtcactgcgtccgaagcagctcggcacgctccgcgtgcttgactgctccgaggacgaaagatttcggtcgcccc

SEQ ID NO: 18131 - RNA, 134 nt, Rhodococcus erythropolis
  source 1..134: mol_type = other RNA; note = Related to NZ_CP007255.1
ggtgagagttggtccacgcgaccagtctcaggggtaacccctgggtcggccagaagaattggatactgcgtccaccggcgttcggcacgctccgcgtgcttgccgccgcaccggacaaaggatttggtcacccc

SEQ ID NO: 18132 - RNA, 149 nt, unidentified
  source 1..149: mol_type = other RNA; note = Related to JAGRPD010000186.1; note = Verrucomicrobiales bacterium
ccccagcctgactccgaagtgagcccacgcttccttcgcggtccgtccggggcatccccgggctgcatgaaacacctcaccataccgtcgcgccagcccctccgcgctccacgcggcacggctgcgcgcacaacgggcttcgtgggggc

SEQ ID NO: 18133 - RNA, 149 nt, unidentified
  source 1..149: mol_type = other RNA; note = Related to JAJTHZ010000014.1; note = Xanthomonadaceae bacterium
cccgagttcatgccgtgatcgatgcgtaacgtcgaatccggccgccgcggggtttccccgcggtgagacaccgcacatcgggctctacatggcagcgacgtacctgcgacacgtcgcagagcggtcgccgcagacgaagacgtcggggc

SEQ ID NO: 18134 - RNA, 139 nt, Microbacterium pseudoresistens
  source 1..139: mol_type = other RNA; note = Related to NZ_JACCBH010000001.1
gacgaggcgggtggtacacgcgttgtcccgccctctccggggctaccccggggtacgcaggctgatcaggaacgaccgccgcaggcacctcactgcgcttcgcgcagaccggcgcccgcactgatggacgagtcgtccg

SEQ ID NO: 18135 - RNA, 139 nt, Microbacterium murale
  source 1..139: mol_type = other RNA; note = Related to NZ_BMCM01000001.1
gacgaggcgagtggttcacgatgtgttccgctctctccggggtcaccccggggtacgcagtctgacctggaacgaacgccgcaggcgcctccttgcgcttcgcgcaatacagcgcccgcactgatggatgagtcgtacg

SEQ ID NO: 18136 - RNA, 139 nt, Microbacterium sp.
  source 1..139: mol_type = other RNA; note = Related to NZ_PCOT01000008.1
agcgagacgggtggttcacgcggtgagccatcctctccggggataccccggggcacgcaggccgatctggaacgaacgccgcaggcgcctccctgcgcttcgcgcagtacagcgcccgcactgatggacgagtcgcgcg

SEQ ID NO: 18137 - RNA, 139 nt, Microbacterium keratanolyticum
  source 1..139: mol_type = other RNA; note = Related to NZ_JAFBBQ010000001.1
gacgaggcgggtggttcacgaggtgttccatcctctccggggataccccggggcacgcaggctgagctgacagaaacgccgcaggcgcctccctgcgcttcgcgcagtacagcgcccgcactgatggacgagtcgtgcg

SEQ ID NO: 18138 - RNA, 139 nt, Salinibacterium sp.
  source 1..139: mol_type = other RNA; note = Related to NZ_CP035375.1
gtcgaggcggatggagcgcgagccgttctatcctcttcggggataccccgaggtacgcagactgagttacgacacacgccgcgggcgcgccactgcgcttcgcgcagcaatgcgcccgcagtgacagacaggtcgatct

SEQ ID NO: 18139 - RNA, 139 nt, Leifsonia sp.
  source 1..139: mol_type = other RNA; note = Related to LMDN01000001.1
gacgaggtgggtggtgcacgagctgttcctccctctccggggctaccccggggcacgcagaccgagatgagacaaacaccgtcggcaccacgctgcgctccgcgcagctccgtgccgacaccgatcgacgagtcgtccg

SEQ ID NO: 18140 - RNA, 139 nt, Cryobacterium sp.
  source 1..139: mol_type = other RNA; note = Related to NZ_JPRS01000007.1
ggcgaggtggatggtgcatgcgttgtaccgtcctctccggggataccccggggcacgaagatcgactgtgaacgaccgccgcaggcgcatttctgcgctccgcgcagccccgcgcctgcactgagagacgagtcgtccg

SEQ ID NO: 18141 - RNA, 139 nt, Cryobacterium sp.
  source 1..139: mol_type = other RNA; note = Related to NZ_PJJO01000056.1
ggcgaggcgggtggtacacgcgttgtgctgccttctccggggctaccccggggcacgaaggtcatctgtgaacgagcgccgcaggcgcgtctctgcgctccgcgcagcacggcgcctgcacgaagggacgagtcgcccg

SEQ ID NO: 18142 - RNA, 139 nt, Cryobacterium roopkundense
  source 1..139: mol_type = other RNA; note = Related to NZ_JACHBQ010000001.1
ggcgaggcgggtagtgcacgtgatgtgctgccctctccggggttaccccggggcacgaagaccgacctggaacgagcgccgcaggcgcgtctctgcgctccgcgcagctcggcgcctgcacccagtgacgagtcgcccg

SEQ ID NO: 18143 - RNA, 139 nt, Cryobacterium melibiosiphilum
  source 1..139: mol_type = other RNA; note = Related to NZ_QZVS01000068.1
ggcgaggcgggtggtgcacgcgttgcgccgccctctccggggctaccccggggcacgcagaccgaccaggacagaccaccgcaggcacgccactgcgctccgcgcagctcggtgcccgcaccgatggacgagtcgcccg

SEQ ID NO: 18144 - RNA, 139 nt, Cryobacterium sp.
  source 1..139: mol_type = other RNA; note = Related to SOHE01000083.1
ggcgaggcgggtggtgcacgcgttgcgccgccctctccggggctaccccggggcacgcagaccgaccaggaacgaacaccgcaggcacgccactgcgctccgcgcagctcggtgcccgcaccgatcgacgagtcgcccg

SEQ ID NO: 18145 - RNA, 139 nt, Marisediminicola senii
  source 1..139: mol_type = other RNA; note = Related to NZ_JAALGE010000001.1
aacgaggtggcaggtacccgagcggtgcccgcctctccggggttaccccggggcacgcaggccgagatggaacgagcgccgcgggcgcggccctgcgcttcgcgcagccgtgcgcccgcacgaacggacgagtcgtccg

SEQ ID NO: 18146 - RNA, 139 nt, unidentified
  source 1..139: mol_type = other RNA; note = Related to JABMLG010000003.1; note = Microbacteriaceae bacterium VKM Ac-2855
cgcgaggcggacggtggcacgcgatgcaccgtcctctccggggctaccccggggcacgaagaccgactgagccacgcgacgcaggcgcctctctgcgcttcgcgcagccgagcgcccgcactgatcgacaggtcgcgcg

SEQ ID NO: 18147 - RNA, 138 nt, unidentified
  source 1..138: mol_type = other RNA; note = Related to JABMLH010000001.1; note = Microbacteriaceae bacterium VKM Ac-2854
ggcgaggcggatcggcgcacgatgtgcgtcgtcctccccggggccaccccggggcacgaagaccgacggagagacgcggcgctgcgccacgctgcgcttcgcgcaggcgagcgcacgcacggagagacaggtcgcgcg

SEQ ID NO: 18148 - RNA, 139 nt, Marisediminicola antarctica
  source 1..139: mol_type = other RNA; note = Related to NZ_CP017146.1
gacgaggtgggtggcacacgcgatgcgccgccatctccggggataccccggggcacgaagaccgacctggaacgagcgccgcaggcgcctccctgcgctccgcgcagctcagcgcccgcactgaaggacgagtcgtccg

SEQ ID NO: 18149 - RNA, 139 nt, Arthrobacter sp.
  source 1..139: mol_type = other RNA; note = Related to NZ_CP095501.1
gccgaggcgggacgcgtacgcagtgcgcgttcctctccggggcaaccccggggcacgcagaccgaccagcacagggcgcctcaggcgcccgcctgcgctccgcgcagctcagcgcccgaacagagggacaggtcggccg

SEQ ID NO: 18150 - RNA, 139 nt, Arthrobacter pityocampae
  source 1..139: mol_type = other RNA; note = Related to NZ_PRKW01000004.1
gccgaggcgggccgcgtacgccgtgcgcggtcctctccggggctaccccggggcacgcagaccgaccggcacagggcacctcaggcgcccgactgcgctccgcgcagctcagcgcccgaacagagtggcaggtcggccg

SEQ ID NO: 18151 - RNA, 139 nt, Arthrobacter agilis
  source 1..139: mol_type = other RNA; note = Related to NZ_CP024915.1
gccgaggcggaacacgtacgcagtgcgcgttcctctccggggtcaccccggggcacgcagaccgaccagcacagggcgcctcaggcgcctgactgcgctccgcgcagctcagcgcccgaacagaaggacaggtcggccg

SEQ ID NO: 18152 - RNA, 140 nt, Vibrio cholerae
  source 1..140: mol_type = other RNA; note = Related to WNZI01000030.1
gccgaggcggagcacgtacaccgtgcgcgctcctctccggggttaccccggggcacgcagaccgaccagcacagggcgcctcaggcacctgactgcgcttcgcgcagctcagcgcccgaacagagagaacaggtcggccg

SEQ ID NO: 18153 - RNA, 139 nt, Arthrobacter agilis
  source 1..139: mol_type = other RNA; note = Related to LR131272.1
gccgaggcggtgcgcgtacgcagtgcgcgctcctctccggggctaccccggggcacgcagaccgaccagcacacggcgcctcaggcacctgactgcgcttcgcgcagctcagcgcccgaacaggaggacaggtcggccg

SEQ ID NO: 18154 - RNA, 139 nt, Arthrobacter sp.
  source 1..139: mol_type = other RNA; note = Related to LMLU01000001.1
gccgaggcgggccacgtacgcggtacgcggtcctctccggggataccccggggcacgcagaccgaccagcacagagcgcctcgggcacctgactgcgctccgcgcagctcagcgcccgaacaggacgacaggtcggccg

SEQ ID NO: 18155 - RNA, 139 nt, Arthrobacter sp.
  source 1..139: mol_type = other RNA; note = Related to LGIU01000097.1
gccgaggcggagcacgcacgcggtgcgcgttcctctccggggctaccccggggcacgcagatcgaccagcacagggcgcctcgggcacctgactgcgctccgcgcagcacagtgcccgaacagcaggacaggtcggccg

SEQ ID NO: 18156 - RNA, 137 nt, Arthrobacter sp.
  source 1..137: mol_type = other RNA; note = Related to NZ_JAFMPX010000005.1
gacgaggtggaactgcactcgtgcaggttcctccccggggctaccccggggcacgtagtaccgctcgagaaggcgccgcgggtgggggctctgcgctccgcgcagcacaccacccgcaccgacagacaggtcgtctg

SEQ ID NO: 18157 - RNA, 139 nt, Subtercola boreus
  source 1..139: mol_type = other RNA; note = Related to VFOO01000001.1
gacgaggtggacggttcaggttctgatccgtcctctccggggtcaccccggggtacgcaggccgactcaggcacttcgccgcaggcgtctcaccgcacttcgagcggccgaacgcccgcacagacgcacaggtcgtctg

SEQ ID NO: 18158 - RNA, 139 nt, Subtercola boreus
  source 1..139: mol_type = other RNA; note = Related to NBXA01000026.1
gacgaggtggacggttcacgacgtgatccgccctctccggggccaccccggggtacgcagaccgactcaggcacttcgccgcaggcgtctcaccgcacttcgagcggccgcacgcccgcacagacgcacaggtcgtctg

SEQ ID NO: 18159 - RNA, 139 nt, Subtercola boreus
  source 1..139: mol_type = other RNA; note = Related to NZ_NBXE01000029.1
gacgaggtggatggttcagacgctgatccgtcctctccggggctaccccggggcacgcagatcgattccggcacgacgtcgcaggcgcctctccgcactccgagcggccgagcgcccgcgcttcagcacaggtcgtctg

SEQ ID NO: 18160 - RNA, 145 nt, Mycetocola lacteus
  source 1..145: mol_type = other RNA; note = Related to RCUY01000005.1
gtcgagaacgggagggcacaccatgcgttgctcccttccgctccggggtaaccccggggaccgcaaaccgagtaccaccacgcgccccgagtgcccgccgacgcttcgcgtcgcaccgcacacggccgcctcaaccggtcgatcg

SEQ ID NO: 18161 - RNA, 144 nt, Mycetocola tolaasinivorans
  source 1..144: mol_type = other RNA; note = Related to NZ_RCUX01000009.1
gtcgagaacggagggcgaaacatgcgtgattcccttccgctccggggtaaccccgggggccgcagaccgagcaggaccacgcgccccgagtgcctcccgacgcttcgcgtcgcaccgcacacggccgcatcgaccggtcgatca

SEQ ID NO: 18162 - RNA, 140 nt, Mycetocola spongiae
  source 1..140: mol_type = other RNA; note = Related to NZ_CP080203.1
ggtgaggcgggtgatccacatcatggtgacatcctccccggggttaccccggggcacgcagtccgagctattatccacgcctcgggtgccccgcagcgcttcgcgcagcccggcatccgagaccagtgcagggtcaccgc

SEQ ID NO: 18163 - RNA, 140 nt, Arthrobacter sp.
  source 1..140: mol_type = other RNA; note = Related to CP007595.1
gatgaggcgggaggcgtccttgggcgcgcatccctccccggggctaccccggggcacgaattattgcctgattcatgcaccgcaggtgcgtcactgcgctccgcgcagcagcgcacccgcacagacagccaggtcatcgg

SEQ ID NO: 18164 - RNA, 140 nt, Arthrobacter alpinus
  source 1..140: mol_type = other RNA; note = Related to CP013200.1
gatgaggcgggaagcgtcctttggcgcgcgtccctctccggggctaccccggggtatgcagtattgcctgatccatgcaccgcgggtgcgtcactgcgctccgcgcagcagcgcacccgcacagacagccgagtcatcaa

SEQ ID NO: 18165 - RNA, 140 nt, Arthrobacter stackebrandtii
  source 1..140: mol_type = other RNA; note = Related to NZ_JAGIOI010000001.1
gatgaggcgggaagcggcctttggcgcgcatccctccccggggctaccccggggcacgaaatattgcctgatccatgcaccgcaggtgcggcactgcgctccgcgcagctgcgcacccgcacagacagccgggtcatcgg

SEQ ID NO: 18166 - RNA, 140 nt, Arthrobacter psychrolactophilus
  source 1..140: mol_type = other RNA; note = Related to NZ_QJVC01000003.1
gatgaggcgggaagcgtctttcggcgcccatccctccccggggttaccccggggcacgcagttttgcctgatccatgcacctcggatgcgtcgttgcgctccgcgcaactgggcaaccgaacagacagccaggtcatcgg

SEQ ID NO: 18167 - RNA, 140 nt, Paeniglutamicibacter antarcticus
  source 1..140: mol_type = other RNA; note = Related to NZ_CZJT01000056.1
gatgaggtgggaagcgttatttagcgcgctttccgctccggggttaccccgggggacgcagtcttacctgattcaagcaccgtgggtgcctcgctgcgctccgcgcaggagcgcacccacaccgatagccgggtcatcga

SEQ ID NO: 18168 - RNA, 140 nt, Arthrobacter alpinus
  source 1..140: mol_type = other RNA; note = Related to NZ_CP013745.1
gatgaggcgggaagcggcttttggcgcgcctccctccccggggctaccccggggtacgcagtattgcctgatcgaagcacctcgggtgcggcgctgcgctccgcgcagctcggcacccggacagagcgccaggtcatcga

SEQ ID NO: 18169 - RNA, 140 nt, Paeniglutamicibacter terrestris
  source 1..140: mol_type = other RNA; note = Related to NZ_JAAWVT010000016.1
gatgaggtgggaagcgtcttttagcacgcgttcctctccggggataccccggggtacgcagtattgcctgatccatgcaccgcaggtgcgtctctgcgcttcgcgcagctcggcacccgcacagacagctaggtcatcgg

SEQ ID NO: 18170 - RNA, 139 nt, Arthrobacter cryoconiti
  source 1..139: mol_type = other RNA; note = Related to NZ_JAJJBU010000018.1
gatgaggtgggtacggcacctagtgcgcgtccctctccggggttaccccggggcttgcacgtcaccctgagacatccgcctcgggtgcctcactgcgctccgcgcagcagcgcacccgaacagagagtgaagtcatcca

SEQ ID NO: 18171 - RNA, 138 nt, Arthrobacter silviterrae
  source 1..138: mol_type = other RNA; note = Related to NZ_JAAKZI010000011.1
gatgaggcgggcgggcacctggtgcaccaccctctccggggttaccccgggggacgaagactggcctccagcatgcgcctcgggcgcctgtctgcgctccgcgcagctcagcgcccgaacagactgacaggtcatcca

SEQ ID NO: 18172 - RNA, 139 nt, Arthrobacter sp.
  source 1..139: mol_type = other RNA; note = Related to NZ_CP029642.1
gatgaggcgggcgggcatcacggtgcaccaccctctccggggctaccccggaggacgaagactggcctccagcaagcgcctcgggcgccactctgcgctccgcgcagccgcgcgcccgaacagacagacaggtcatcca

SEQ ID NO: 18173 - RNA, 139 nt, Arthrobacter sp.
  source 1..139: mol_type = other RNA; note = Related to NZ_CP012479.1
gatgaggtgggtgggcatttgcgtgccctgccctctccggggataccccgggggacgaagaacgacctcctgcaagcaccgcagccgcctcgcagcgctccgcgcagcagggcggccgcacagactgacgggtcatccg

SEQ ID NO: 18174 - RNA, 139 nt, Arthrobacter glacialis
  source 1..139: mol_type = other RNA; note = Related to NZ_PPXB01000002.1
gatgagatggggagtcaccttggtgacccaccctctccggggctaccccgggggacgaagacgtacctccagcatgcgccttgggcgcgccgctacgctccgcgaagcgcggcgcccaaacagacagattggtcatcat

SEQ ID NO: 18175 - RNA, 139 nt, Arthrobacter sp.
  source 1..139: mol_type = other RNA; note = Related to NZ_KI519454.1
gatgaggtgggcagtgccttgaaagcacttccctctccggggctaccccggggcacgcagttcgaccagcaccacgcgccgtgggcccgcccctgcgctccgcgcagcacggggcccacacagacagatgggtcatccg

SEQ ID NO: 18176 - RNA, 139 nt, Arthrobacter sp.
  source 1..139: mol_type = other RNA; note = Related to NZ_PJIO01000003.1
gatgaggtgggagaaacacgtggtgtctatccctctccggggttaccccggggcacgcaatattgcctggaccatgcaccgcaggtgcggctctgcgctccgcgcagcacggcacccgcacagatagttaagtcatccg

SEQ ID NO: 18177 - RNA, 139 nt, Arthrobacter alpinus
  source 1..139: mol_type = other RNA; note = Related to CP012677.1
gatgaggcgggagaaacactttgtgttcatccctctccggggttaccccggggtacgcagtattgcctggaccatgcaccgctggtgcctcactgcgctgcgcgcagccgggcaccagcacagacagccaagtcatccg

SEQ ID NO: 18178 - RNA, 136 nt, unidentified
  source 1..136: mol_type = other RNA; note = Related to JABBNV010000050.1; note = Acidobacteria bacterium
ggcgaggctggattgcaactagttgcagtcctctccggggctaccccggggtacaaggcacggatggccattgcaccgcgggtggggcactgcgcttcgcgcagctcgccacccgcacagactgacaggtcgccgg

SEQ ID NO: 18179 - RNA, 139 nt, Arthrobacter sp.
  source 1..139: mol_type = other RNA; note = Related to NZ_JADNYM010000009.1
gatgaggcgggtggtgtacttcgtataccgtcctctccggggctaccctggggcacgcagaattacctgaagcaagcgccgcaggcgccagactgcgctccgcgcagctgcgcgcccgcacagatagacgggtcatcca

SEQ ID NO: 18180 - RNA, 140 nt, Arthrobacter pigmenti
  source 1..140: mol_type = other RNA; note = Related to NZ_JAATJL010000001.1
gacgaggcggatggtgcacgcgatgttccatcctctccggggctaccccgggggacgcagatagacctcacacagagcgcctcaggtgcgacgctgcgcttcgcgcagtcaggcacccgaacggacaggcaggtcgtccg

SEQ ID NO: 18181 - RNA, 139 nt, Frigoribacterium endophyticum
  source 1..139: mol_type = other RNA; note = Related to NZ_JAAOYV010000002.1
ggcgaggcgggtgctccacgcgctggatcaccctctccggggcaaccccggggcacgcagttcgaccacggcaccgctccccgagccgaccaccgcgctgcgcgcggagaccggcccggaccgacgcacgagtcgccgg

SEQ ID NO: 18182 - RNA, 139 nt, Frigoribacterium sp.
  source 1..139: mol_type = other RNA; note = Related to RKIE01000002.1
gacgaggcgggcggcctccgcgtgaggtcgtcctctccggggcaaccccggggcacgcagtcagaccacggcaccgctccccgagccggtcaccgcgctccgcgcggcgggcggcacggaccgacgcacgagtcgtcac

SEQ ID NO: 18183 - RNA, 139 nt, Frigoribacterium sp.
  source 1..139: mol_type = other RNA; note = Related to NZ_LMQR01000001.1
ggcgaggtggacggcacacgcgctgtgccttcctctccggggctaccccggggcacgcagatcgaccacggcaccgcaccgcaggccggtgaccgcgcttcgcgcggctcgcggcccgcaccgacgcacgagtcgccga

SEQ ID NO: 18184 - RNA, 139 nt, Frondihabitans sp.
  source 1..139: mol_type = other RNA; note = Related to NZ_CP014619.1
gacgaggcggacggcgcaggctctgcgccgtcctctccggggctaccccggggcacggagaacgaccaggaacacgcaccgcaggagccagaccgcgcggagcgcggtccagcacccgcaccgatggacgagtcgtccg

SEQ ID NO: 18185 - RNA, 138 nt, Glaciihabitans tibetensis
  source 1..138: mol_type = other RNA; note = Related to NZ_PVTL01000004.1
gttgaggtgggtggttcacgagttgtgccaccctctccggggataccccggggtacgcagaacaccagaaacacgcgccgcaggcgcctgagtgcgcttcgcgcaccacagcgcccgcacagacggacgagtcgaccg

SEQ ID NO: 18186 - RNA, 139 nt, Agreia pratensis
  source 1..139: mol_type = other RNA; note = Related to JADKRN010000004.1
gacgaggtgggtggagtcgacagacggacaccctctccggggtcaccccggggtatgaatctcagcccgagcgcacaaccgcaggcactccaccgcgcttcgcgcggccgcgtgcccgcaacgatcgattggtcgtccg

SEQ ID NO: 18187 - RNA, 139 nt, Agreia pratensis
  source 1..139: mol_type = other RNA; note = Related to NZ_FXAY01000002.1
gacgaggtgggtggagtcgacagacggacaccctctccggggtcaccccggggtatgaatctcagcccgagcgcacaaccgcaggcactccaccgcgcttcgcgcggccgcgtgcccgcaccgatcgattggtcgtccg

SEQ ID NO: 18188 - RNA, 139 nt, Agreia bicolorata
  source 1..139: mol_type = other RNA; note = Related to FUYG01000003.1
gacgaggcgggtggagtcgacagacgaacaccctctccggggtcaccccggggtacaactctcagcctgaacgcacaaccgcaggcaccacaccgcgcttcgcgcggtcgcgtgcccgcaccgatcgatcggtcgcccg

SEQ ID NO: 18189 - RNA, 139 nt, Agreia sp.
  source 1..139: mol_type = other RNA; note = Related to LMNF01000001.1
ggcgaggtgaacggcgtcgcgagacgatcgttctctccggggccaccccggggcacacatcccagccagaacgcacaaccgcaggcaccgcaccgcgcttcgcgcggccgggtgcccgcaccgatcgatcggtcgcccg

SEQ ID NO: 18190 - RNA, 139 nt, Agreia sp.
  source 1..139: mol_type = other RNA; note = Related to NZ_LR882035.1
agcgaggtgggtggcgtctcgcgatgctcaccctctccggggctaccccggggcacttctcctagcctccacacggaaccgcaggcactacaccgcgcttcgcgcggccatgtgcccgcaccgatcgactggtcgctcg

SEQ ID NO: 18191 - RNA, 139 nt, Arthrobacter sp.
  source 1..139: mol_type = other RNA; note = Related to NZ_KI914784.1
gccgaggcggagagtgcacgaggtgcgccctcctctccggggttaccccggggtacgcagatcgaccaggacaaagcgccgcaggcacgtgacagcgctccgcgcagcacagagcccgcacggacggacaggtcggccg

SEQ ID NO: 18192 - RNA, 138 nt, Rathayibacter sp.
  source 1..138: mol_type = other RNA; note = Related to CP047186.1
ggcgaggcggacggggcacgcgctgctccgtcctctccggggtcaccccggggcacgtggatcaaccaggcatcgcgccgcaggcacccgcccgcgctgcgcgcggctcagcgcccgcacttctcgacaggtcgcccg

SEQ ID NO: 18193 - RNA, 138 nt, Rathayibacter festucae
  source 1..138: mol_type = other RNA; note = Related to NZ_CP047180.1
ggcgaggcggacggggcacgcgctgctccgtcctctccggggtcaccccggggcacgtggatcgaccaggcatcacgccgcaggcacccacccgcgctccgcgcggcacagcgcccgcacagctcgacaggtcgcccg

SEQ ID NO: 18194 - RNA, 138 nt, Rathayibacter oskolensis
  source 1..138: mol_type = other RNA; note = Related to NZ_FXBM01000004.1
ggcgaggcggacggggcacgagctgcaccgtcctctccggggtcaccccggggcacgtggatcgaccaggcatcacgccgcaggcacccgccggcgctccgcgccgctcagcgccagcacttctcgacaggtcgcccg

SEQ ID NO: 18195 - RNA, 138 nt, Rathayibacter caricis
  source 1..138: mol_type = other RNA; note = Related to NZ_PZPL01000001.1
ggcgaggcggacgatgcacgagctgcaccgtcctctccggggtcaccccggggcacgtggatcgaccaggcaccgcaccgcaggcacccgcccgcgctccgcgcggctcagcgcccgcacttcccgacaggtcgcccg

SEQ ID NO: 18196 - RNA, 139 nt, Curtobacterium sp.
  source 1..139: mol_type = other RNA; note = Related to NZ_LMMJ01000014.1
accgaggcggccggcgcacgctgtgcgtcgacctctccggggctcccccggggcacgaagtacacccatgaccgtccacctcaggagaagaggcgcgctccgcgcaccgtccctcccgaaccacacgacgagtcggtcg

SEQ ID NO: 18197 - RNA, 139 nt, Curtobacterium sp.
  source 1..139: mol_type = other RNA; note = Related to LMPO01000009.1
ggggaggcggacggcgcgcgagacgcgccgacctctccggggtcaccccggggcacgcaggaccagcaggaccacacgccccgagaggctcggcgcgctccgcgcgctcgccctcacggaggcaccgacaggtcccccg

SEQ ID NO: 18198 - RNA, 139 nt, Curtobacterium sp.
  source 1..139: mol_type = other RNA; note = Related to JALGRO010000013.1
ggggaggcggacggcgcgcgtgacgcgtcgacctctccggggtcaccccggggcacgcagtaccagcaggacgacacgccccgagaggctcggcgcgctccgcgcgcgctccctcacggaggcaccgacaggtcccccg

SEQ ID NO: 18199 - RNA, 139 nt, Curtobacterium sp.
  source 1..139: mol_type = other RNA; note = Related to MJGI01000025.1
ggggaggcggacggcgcgcgtgacgcgccgacctctccggggtcaccccggggcacgcagtaccagcaggaccacacgccccgagaggcacggcgcgctccgcgcactcgccctcacggaagcactgacaggtctcccg

SEQ ID NO: 18200 - RNA, 139 nt, Curtobacterium sp.
  source 1..139: mol_type = other RNA; note = Related to MJGP01000013.1
ggggaggcggacggcgcgcgtgacgcgtcgacctctccggggtcaccccggggcacgcaggaccagcaggaccacacgccccgagaggcgcggcgcgctccgcgcaccagccctcacggaggcaccgacaggtcccccg

SEQ ID NO: 18201 - RNA, 139 nt, Curtobacterium pusillum
  source 1..139: mol_type = other RNA; note = Related to JACGXP010000002.1
ggggaggcggccggcgcgcgtgacgcgccgacctccccggggtcaccccggggcacgcggtaccagcaggacgacacgccccgagcgggcaggcgcgctccgcgcgcgacgccgcacggaggcaccgacgggtcctccg

SEQ ID NO: 18202 - RNA, 139 nt, Curtobacterium herbarum
  source 1..139: mol_type = other RNA; note = Related to JAFBBT010000001.1
ggggaggcggacggcgcgcgtgacgcgtcgacctctccggggtcaccccggggcacgcaggaccagcaggaccacacgccccgagaggctcggcgcgctccgcgcgcgcgtcctcacggaggcaccgacaggtcccccg

SEQ ID NO: 18203 - RNA, 139 nt, Curtobacterium sp.
  source 1..139: mol_type = other RNA; note = Related to QKLJ01000002.1
ggggaggcggacggcgcgcgtgacgcgtcgacctctccggggtcaccccggggtacgcaggaccagcagcaccacacgccccgagaggctcggcgcgctccgcgcgcgcgacctcacggaggcaccgacaggtctcccg

SEQ ID NO: 18204 - RNA, 139 nt, Curtobacterium sp.
  source 1..139: mol_type = other RNA; note = Related to NZ_CP017580.1
ggggaggcggccgacgcgcgtgacgcgtcgacctctccggggtcaccccggggcacgcaggaccagcaggacgacacgccccgagcgggacggcgcgctccgcgcgcgacgccgcacggaggcaccgacgggtcccccg

SEQ ID NO: 18205 - RNA, 139 nt, Curtobacterium sp.
  source 1..139: mol_type = other RNA; note = Related to NZ_CP081964.1
ggggaggcggccggcgcgcgtgacgcgtcgacctctccgggggcaccccggggcacgcaggaccagcaggacgacacgccccgagcaggcgagcgcgctccgcgcgcgacgctgcacggaggcaccgacaggtcctccg

SEQ ID NO: 18206 - RNA, 139 nt, Curtobacterium sp.
  source 1..139: mol_type = other RNA; note = Related to NZ_CP027869.1
ggggaggcggccgacgcgcgcgacgcgtcgacctctccggggtcaccccgggacacgcaggaccagcacgacgacacgccccgagcgggagagcgcgctccgcgcgccacgccgcacggaggcaccgacgggtcccccg

SEQ ID NO: 18207 - RNA, 139 nt, Curtobacterium sp.
  source 1..139: mol_type = other RNA; note = Related to NZ_CP076544.1
ggggaggcggacggcgcgcgcgacgcgtcgccctccccggggtcaccccggggcacgcaggaccagcaggaccacacgccccgagaggctcggcgcgctccgcgcgcgctccctcacggaggcaccgacaggtcccccg

SEQ ID NO: 18208 - RNA, 139 nt, Curtobacterium luteum
  source 1..139: mol_type = other RNA; note = Related to NZ_CP093378.1
ggggaggcggatgacgcacgcggtgcgtcgtcctctccggggtcaccccggggtacgcaggaccagcaggacaccacgccccgagcgggcaggcgcgctccgcgcgcgacgccgcacggaggcaccgacgggtcccccg

SEQ ID NO: 18209 - RNA, 139 nt, Curtobacterium sp.
  source 1..139: mol_type = other RNA; note = Related to JAGGPH010000002.1
ggggaggcggacggcgtacgtggtgcgtcgtcctctccggggcaaccccggggaacgcaggaacagctgacacacccgccccgagaggctcggcgcgctccgcgcgcgctccctcacggcagcaccgatcagtcccccg

SEQ ID NO: 18210 - RNA, 139 nt, Frondihabitans sp.
  source 1..139: mol_type = other RNA; note = Related to NZ_CP014513.1
ggggaggcggacgacgctcgacgagcgccgtcctctccggggtcaccccgggggacgcagaacgaccagcagcacacgccccgagaggctcggcgcgcttcgcgcgctcgacctcacggacgcatcgacgggtcccccc

SEQ ID NO: 18211 - RNA, 139 nt, Curtobacterium sp.
  source 1..139: mol_type = other RNA; note = Related to QKTP01000001.1
ggcgaggcggatggagcacgcgctgctgcatcctctccggggctcccccggggcacgcggatcgaccaggaacacacgcctcaggagctcgggcgcgctccgcgcgctgacgctcccgaacggcacgacgagtcgtccg

SEQ ID NO: 18212 - RNA, 139 nt, Frondihabitans sp.
  source 1..139: mol_type = other RNA; note = Related to NZ_LMNV01000002.1
ggcgaggcgggcggcacacgagctgtgccgccctctccggggctaccccgggggacgaagatcgacgagaacacgacaccgcgagaggccgagcgcgcttcgcgcgccctgcctcccgcaccggcggatgagtcgttcg

SEQ ID NO: 18213 - RNA, 139 nt, Frondihabitans sp.
  source 1..139: mol_type = other RNA; note = Related to RJUO01000002.1
gacgaggcggaccgcgttcgatgagcgcggttctctccggggctaccccgggggacgaggattgaccacgacatgacaccgcgagaggcgaagcgcgcttcgcgcaccctgcctcccgcaccggccgatgagtcgtccg

SEQ ID NO: 18214 - RNA, 139 nt, Klenkia terrae
  source 1..139: mol_type = other RNA; note = Related to NZ_UEXK01000004.1
ctcgaggacgccgtgccgcaggtcgggccggcagctccggggatgccccggggaccgcacgcagcctccaccaccacgcctccggcgcgacgcagcgctccgcgcagctcagcgtcgggacgacgggaccggtcgaccc

SEQ ID NO: 18215 - RNA, 139 nt, Klenkia marina
  source 1..139: mol_type = other RNA; note = Related to NZ_FMUH01000007.1
gtcgagggtgccgctccgcaggtcggcgcggcagctccggggatgccccggggaccgcacgcagcctccaccaccacgcctccggcgtgtcggtgcgctccgcgcacgcgtacgccgggacgacgggtcaggtcgaccc

SEQ ID NO: 18216 - RNA, 139 nt, Klenkia soli
  source 1..139: mol_type = other RNA; note = Related to NZ_FNIR01000011.1
accgaggatgccgtgccgcgcgtcggtccggcagctccggggatgccccggggacagcacgcagcctccaccaccacgcctccggcgctcggcagcgctccgcgcagctccgcgtcgggacgacgggacaggtcggccc

SEQ ID NO: 18217 - RNA, 139 nt, Modestobacter sp.
  source 1..139: mol_type = other RNA; note = Related to LMQC01000019.1
gtcgaggacgccgcaccgctggtcggtccggcagctccggggatgccccggggaccgcacgacgcctccaccacgacgcctccggcgccgcgctgcgctccgcgcagcagagcgccggtccgacgggacaggtcgaccc

SEQ ID NO: 18218 - RNA, 139 nt, unidentified
  source 1..139: mol_type = other RNA; note = Related to CP043652.1; note = Geodermatophilaceae bacterium NBWT11
gccgagggtgccggaccgcaggtcggaccggcagctccgggggtgccccggggaccgcagcacgccgccaccaccacgcctccggccacgcgctgcgctccgcgcagccgatggtcgggacgacgggacaggtcggccc

SEQ ID NO: 18219 - RNA, 139 nt, Modestobacter sp.
  source 1..139: mol_type = other RNA; note = Related to NZ_JAABOZ010000008.1
gtcgaggtcgccggaccgctctgcggaccggcagctccggggcagccccgggcacggcagggagcctccaccaccacgacgcaggcgtgtcgctgcgctccgcgcaggtcaacgcccgcacgacgggactggccgaacc

SEQ ID NO: 18220 - RNA, 141 nt, unidentified
  source 1..141: mol_type = other RNA; note = Related to JACCXW010000487.1; note = Geodermatophilaceae bacterium
ggcgagaaacgcccggccgcttcggcggactggcagctccggggctaccccgggggccgcgtcacgacctcaccacggcaccgcaggcgcgccgctgcacggcaagcagctatgcgcccgcacgaccagacaggtcgcccg

SEQ ID NO: 18221 - RNA, 141 nt, unidentified
  source 1..141: mol_type = other RNA; note = Related to JACDAB010000197.1; note = Geodermatophilaceae bacterium
ggcgagaaacgcccggccgcttcggcggactggcagctccggggctaccccgggggccgcgtcacgacctcaccacggcaccgcaggcgcgccgctgcacgccaagcagctatgcgcccgcacgaccagacaggtcgcccg

SEQ ID NO: 18222 - RNA, 139 nt, Pseudokineococcus marinus
  source 1..139: mol_type = other RNA; note = Related to JABEMA010000014.1
ggcgaggtcgccgacccgcgagccgggacggcgggtccggggctaccccgggcgctgcaggaggagatcgacaccccgccgcaggcaccgcgccgcgctccgcgcggccgggtgcccgcacgacgggacaggtcgtcgg

SEQ ID NO: 18223 - RNA, 138 nt, Nakamurella deserti
  source 1..138: mol_type = other RNA; note = Related to NZ_QCXS01000003.1
ggcgagaacgccggccggcgacggcccggccgctccggggtacccccggggccggaacaccgcagcaagcacgaccgtgcaggcacgtcgtggcgctccgcgccaggttgtgcccgcccagcagggacaggtcgacca

SEQ ID NO: 18224 - RNA, 138 nt, Nakamurella silvestris
  source 1..138: mol_type = other RNA; note = Related to QXCQ01000133.1
gacgagaacgccggtcggcaacgacccggcctctccggggtacccccggggtgcgatcaccgcagttggcaccaccatgcaggcagggcggtgcgctccgcgcacacacctgcccgcccagcagggacaggtcgtcca

SEQ ID NO: 18225 - RNA, 138 nt, Nakamurella multipartita
  source 1..138: mol_type = other RNA; note = Related to NC_013235.1
ggcgagaactccggccggtgacggttcggacgctccggggcacccccggggtgggttcaccgcagttggcaccaccgagcaggcacatcgacgcgctccgcgcatgcaggtgcccgcccagcagggacaggtcgccca

SEQ ID NO: 18226 - RNA, 152 nt, Nakamurella flava
  source 1..152: mol_type = other RNA; note = Related to SZZH01000005.1
gacgagaactccgatcgggaacggctcgtccgtccctgtcccggacgctccggggtacccccggggtgagcatgtcgcaccaggcacgaccgagcaggcccggcgctgcgctccgcgaaggagcgggcccgcccagcagcacaggtcgtcgt

SEQ ID NO: 18227 - RNA, 124 nt, Nakamurella leprariae
  source 1..124: mol_type = other RNA; note = Related to NZ_JAERWK010000005.1
gccgggccgatgccggagcctccggggcaaccccggggccagcaggtcgagcaccgcagcgcaccgcaggccggacgacaggctccacctctgtcgcggcccgcacaggcgagcaggtcgtcgt

SEQ ID NO: 18228 - RNA, 150 nt, Nakamurella flavida
  source 1..150: mol_type = other RNA; note = Related to NZ_JAERWL010000005.1
cacgagaacgtccgagtccccgggtccgcccggggccgggactctccggggtacccccggggtcgagcaggtcagctccaccagcacgccgcaggcaggcgcatggcgctccgcgccaggacctgcccgcacagcgacaccggtcgtgcg

SEQ ID NO: 18229 - RNA, 141 nt, Microlunatus sagamiharensis
  source 1..141: mol_type = other RNA; note = Related to NZ_LT629799.1
ggcgagatcacgagcccgctccggcgggatcggtgcccgaggctccctcgggtagtagcaggtccacctcgcagcaggtccgcaggtgcgagaccgcgctccgcgcggctcggcacccgctcgtgcaggactggtcgtccg

SEQ ID NO: 18230 - RNA, 141 nt, Microlunatus antarcticus
  source 1..141: mol_type = other RNA; note = Related to JACHZG010000001.1
ggcgagaacgcgaccccgctccggcgggatcggtgcccgaggctccctcgggtggcagcaggtcaaccccgcagcaggtcggcaggtgcgcgactgcgctccgcgcaggtcggcacccgctcgtgcaggactggtcgtccg

SEQ ID NO: 18231 - RNA, 139 nt, Microlunatus phosphovorus
  source 1..139: mol_type = other RNA; note = Related to AP012204.1
cgcgagaatccgagccgcttcggcggatcggcgcccgaggctccctccggtgacagcacgttcaccctgccgcaggtccgcaggtgccccgctgcgcttcgcgcaggaacgcacccgctcaggcaagacaggtcgcccg

SEQ ID NO: 18232 - RNA, 155 nt, Microlunatus soli
  source 1..155: mol_type = other RNA; note = Related to NZ_LT629772.1
agcgaggttccaccgcacagtgcgacaatcaacgatctgtcgtcgtgcggcgcccgaggaaccctcgggtgatggtgatcattccggccgacgatcgcaggcaacgcagcgggctccgcccgcctctttgcccgcagcacaggacaggtcgcagt

SEQ ID NO: 18233 - RNA, 139 nt, Microlunatus endophyticus
  source 1..139: mol_type = other RNA; note = Related to NZ_BMMZ01000006.1
agcgaagattcaccgggcatcaacgatgtctggcgcccgaggcaccctcgggtgggagtgatccacggtgcagcacgatcgcaggccacgcggcgggctccgcccgcgtgctggcccgcacgacgcgacaggtcgcacg

SEQ ID NO: 18234 - RNA, 139 nt, unidentified
  source 1..139: mol_type = other RNA; note = Related to JADJPO010000003.1; note = Kineosporiaceae bacterium
gacgagatggccgacgcggcaacgcgtccggcgtcttcggggctaccccgaggtgggcacgacaaccagggcatcacggcgcaggtgccggacagcgctgcgcgctgttccgcacccgcaggacgagttcggtcggacg

SEQ ID NO: 18235 - RNA, 140 nt, Kineosporia corallincola
  source 1..140: mol_type = other RNA; note = Related to JAHBAY010000005.1
ggcgagaactccggctggcctcgtccggacggtcgctccggggctaccccggggaaaccggcacgtcctcggcatcacgccgcacgtgccacgcagcgctccgcgctgctacgcacgcgcactgcacgacaggtcgcacc

SEQ ID NO: 18236 - RNA, 140 nt, Kineosporia babensis
  source 1..140: mol_type = other RNA; note = Related to NZ_JAJOMB010000003.1
gacgagaacgccgtccggccggttccgggcggttgatccggggttaccccgggcacggcaccatatccacggcaccacgccgcacgtgcaccgcagcgctccgcgcagctcggcacgcgcacaaccggtcaggtcgttgc

SEQ ID NO: 18237 - RNA, 137 nt, Motilibacter aurantiacus
  source 1..137: mol_type = other RNA; note = Related to JAANNO010000010.1
ggcgagaccgccggagcgcttcgcgccggccgctgcggggctcccccgtggcacggttcctctgttgggcaccacgtcgcatgcacgtctccacgctgcgcggaggcgagtgcacgcacggcgagacaggtcgccgc

SEQ ID NO: 18238 - RNA, 154 nt, Nakamurella panacisegetis
  source 1..154: mol_type = other RNA; note = Related to NZ_LT629710.1
ggcgagactgctggttcgcctccgagtggtcagcggggccgatcagctgctccggggataccccggggccggttgtggtggtatcgcagcacgtcacaggcatgatgccgcgctccgcgcagggcaatgcccgtcaggcaggacaggtcgcctg

SEQ ID NO: 18239 - RNA, 159 nt, Nakamurella sp.
  source 1..159: mol_type = other RNA; note = Related to NZ_CP060298.1
ggcgagactgctggttcgcctccgcgcagggatcggcggaggtcgaccggctgctccggggttaccccggggtaggtatcggtggtaccgcatcacgtcgcaggcacgcggttgcgctccgcgcaacgccgtgcccgccaggcggggacaggtcgcccg

SEQ ID NO: 18240 - RNA, 140 nt, Kineococcus siccus
  source 1..140: mol_type = other RNA; note = Related to JAAALN010000029.1
ggcgagagggtcaggccggtgcgccggcccgaccggtccggggtcaccccgggcgcagcacgacgaccacggcgcggcgccgcaggaacccgcctgcgctccgcgcagctcagtacccgcacgacgggacgggtcgcccg

SEQ ID NO: 18241 - RNA, 140 nt, Paenibacillus sp.
  source 1..140: mol_type = other RNA; note = Related to JALDAT010000072.1
ggcgagagggccgagccggtacgccggtgacgccgctccggggttcccccggggacagcacgacgaccacggcagggcgccgcagggacgtcgctgcgctgcgcgcaggacggtccccgcacgacgggacgggtcgcccg

SEQ ID NO: 18242 - RNA, 152 nt, Kineococcus aurantiacus
  source 1..152: mol_type = other RNA; note = Related to JACCBB010000001.1
tgcgagagggccctcccggcgccggtgcaccggcggtggggcggcagctccggggtcaccccgggggcagcacgacacgttcggcaccacgccgcaggatcgaccgtgcgctgcgcgcactgcggatcccgcaccgcgggacaggtcgcccg

SEQ ID NO: 18243 - RNA, 148 nt, unidentified
  source 1..148: mol_type = other RNA; note = Related to JAFAOY010000834.1; note = Solirubrobacterales bacterium
accgaggtgggtgttggcgccttcgggcgctgagccctctccgggggtaccccggggacacctttgtgaccaggccagcgcatcgcgagccctcgcctgcgtccgtcggaagcagctcagggcacgcacgacgaagtgcagtcggcgc

SEQ ID NO: 18244 - RNA, 152 nt, unidentified
  source 1..152: mol_type = other RNA; note = Related to JAFARL010000184.1; note = Solirubrobacterales bacterium
accgaggtgggtcgacgcgcccctgtgggcgctgaaactctctccggggctaccccggggacaccggtgtgaccaggccagcgcatcgcgagccctcccctgcgtccggttggaagcagttctgggcacgcacgacgaagtgcagtcggcgc

SEQ ID NO: 18245 - RNA, 150 nt, unidentified
  source 1..150: mol_type = other RNA; note = Related to JACCUP010000282.1; note = Thermoleophilaceae bacterium
gccgaggcggaacggacgcgccttcgggtgcgtcctcctctccggggccaccccggggataccgaagtgagcagggcagcgcaccgcgggcccgctactgctcccatcacggggcaggtcggggcacgcacgacgtggagcggtcggcac

SEQ ID NO: 18246 - RNA, 150 nt, unidentified
  source 1..150: mol_type = other RNA; note = Related to JACCUX010000400.1; note = Solirubrobacterales bacterium
accgaggcgggtggacgcgccttcgggtgcgtctccctctccggggctaccccggggaaagcaggtctgaccgaagcagagcatcgcgagcccttcgctgcacccacaagggggcaggcgcgggcgcgcacggcacagagcggtcggcgg

SEQ ID NO: 18247 - RNA, 145 nt, Patulibacter minatonensis
  source 1..145: mol_type = other RNA; note = Related to NZ_KI912613.1
cccgagacggcaccgcggatccctcgggatcacgggccgctccggggaacccccgggggcaccggtgatggccggacatcgcatcgcgtgcgctcgaccgccgctccgcgcgggggcgcgcacgcacgacgcaggaggtcgggcc

SEQ ID NO: 18248 - RNA, 142 nt, Conexibacter woesei
  source 1..142: mol_type = other RNA; note = Related to NZ_AUKG01000002.1
cccgagccggtgcgcccgccctcgggcgggccacctctccggggtcaccccggggatcagcaggaaccacggcacggcagcgcgtgcgggctgcggcgacgagccgccatgccccgcacgcacgacacgggaccgtcgggcc

SEQ ID NO: 18249 - RNA, 146 nt, unidentified
  source 1..146: mol_type = other RNA; note = Related to JAEMSV010000041.1; note = Solirubrobacteraceae bacterium
cccgagccggtactgcgcatccccgtggtgcgcagcgccctccggggctcccccggggacgacctccacacctcagcaccacatcacgtgcgacctgccgctgcttcgccgcgggtctacgcacgtacgacgggagacgtcgggcc

SEQ ID NO: 18250 - RNA, 163 nt, Solirubrobacter pauli
  source 1..163: mol_type = other RNA; note = Related to NZ_RBIL01000001.1
cccgagcccgcaccggacatgaagggtcagaccccttgtgttcgcgaggtgcgtctccggggttcccccggggagatcgaggtaccagaggcagtgcatcgcgtgtgcgcgggtgcgcccgtccggggcacgtctgcacacgcacgacaggagccgtcgggtg

SEQ ID NO: 18251 - RNA, 147 nt, unidentified
  source 1..147: mol_type = other RNA; note = Related to QHCD01000081.1; note = Pseudonocardiales bacterium
gtcgagagggtcgatgcgcgattccggtcgcccgtcgatcgctccggggaaaccccggggacgaacaagatccctcgcctccacatcacatgcgccgacgtgcgccacaacgcacccgcgcgcacgcacgatgagacaggtcgactc

SEQ ID NO: 18252 - RNA, 146 nt, unidentified
  source 1..146: mol_type = other RNA; note = Related to CADCTB010000222.1; note = Acidimicrobiales bacterium
cgcgagacctgtccggaccgccttcgggcgggaccggatcgctccggggttaccccggggtcatcgccttacctgggcatctcgtcgcatgcgcccgcgtccgctccacggacggcagcgcacacaccactgggactcgtcgcgtt

SEQ ID NO: 18253 - RNA, 135 nt, unidentified
  source 1..135: mol_type = other RNA; note = Related to JAFMRN010000002.1; note = Solirubrobacterales bacterium
tttgagttgggtcagcggaccctctctgggggttccccagggatcaccattcagtagggcaatgcgtcgcgcgtcctactttgtcgtgccccttcgtggcacctcgggacggcgcaggacaggagcagtcaagcc

SEQ ID NO: 18254 - RNA, 146 nt, Euzebya tangerina
  source 1..146: mol_type = other RNA; note = Related to NZ_PPDK01000002.1
accgagatcggttgccggcccctcgcgggtctggtcaccaccttcggggaacccccgaggacacacgcgtcatctgacgctccatcgcatgcaggtgctgcacgcgttgcgtgcgagtctgcacacaccacgaagctggtcgggac

SEQ ID NO: 18255 - RNA, 144 nt, Nocardioides hwasunensis
  source 1..144: mol_type = other RNA; note = Related to NZ_JACXYY010000008.1
ttcgagacggcggaccggtgcgtgtcaccggtcagcttccccggggctaccccggggaccaccggaatgttcgggcacggcaccgcgcgcgacaggctgcgctccgctgcaggtcgccgcgcgcacgacgggacaggtcgagct

SEQ ID NO: 18256 - RNA, 144 nt, Nocardioides exalbidus
  source 1..144: mol_type = other RNA; note = Related to NZ_FNRT01000002.1
ttcgagacggctcaccggtgcgcgtcaccggtcagcttctccggggctaccccggggaccaccggaacgttcgggcactgcaccgcgcgcgacgcgctgtgcttcgctgcaggaggtcgcgcgcacgacgggacaggtcgggct

SEQ ID NO: 18257 - RNA, 144 nt, Nocardioides lijunqiniae
  source 1..144: mol_type = other RNA; note = Related to NZ_JACJGN010000045.1
ctcgagacggcgaaccggtgcgtgacaccggcaagcctccccggggctaccccgggggccaccgacatgttcgggcacggcaccgcgcgcgcatcgctgcgctccgctgcaggtccgcgcgcgcacgacgggacaggtcgagca

SEQ ID NO: 18258 - RNA, 144 nt, Nocardioides sp.
  source 1..144: mol_type = other RNA; note = Related to NZ_CP053660.1
ctcgagacggcgaaccggtgcatgacaccggtctgcctccccggggataccccgggggccaccggcatgttcgggcacagcaccgcgcgcgactcgctgcgcttcgctgcaggtcttcgcgcgcacgacgggactggtcgagca

SEQ ID NO: 18259 - RNA, 144 nt, Nocardioides cavernae
  source 1..144: mol_type = other RNA; note = Related to NZ_JAFBCA010000001.1
ctcgagacggcggaccggtgcgcgtcaccggtcggcttctccggggctaccccggggaccaccggatcgttcgggcacggcaccgcgcgcgactcgctgcgctccgctgcaggtcatcgcgcgcacgacgggacaggtcgggct

SEQ ID NO: 18260 - RNA, 144 nt, Nocardioides sp.
  source 1..144: mol_type = other RNA; note = Related to NZ_CP022296.1
ctcgagacggcggaccggtgcgcgtcaccggtttgcttctccggggctaccccggggaccaccggtacgtccgggctcagcaccgcgcgcgactcgctgcgctccgctgcaggtcatcgcgcgcacgacgggacaggtcgggcc

SEQ ID NO: 18261 - RNA, 144 nt, Nocardioides sp.
  source 1..144: mol_type = other RNA; note = Related to JABJQY010000002.1
ctcgagacggcggaccggtgcgcgtcaccggtcggcctccccggggataccccggggaccaccggtacgtccgggcacggcaccgcgcgcggctcgctgcgctccgctgcaggccaccgcgcgcacgacgggacaggtcgagca

SEQ ID NO: 18262 - RNA, 144 nt, Nocardioides sp.
  source 1..144: mol_type = other RNA; note = Related to NZ_CP087710.1
ctcgagacggcggaccggtgcgcgtcatcggtcggcctccccggggctaccccggggaccaccggtacgtccgggctcagcaccgcgcgcgacgcgctgcgcttcgctgcaggagatcgcgcgcacgacgggacaggtcgaggc

SEQ ID NO: 18263 - RNA, 144 nt, Nocardioides sp.
  source 1..144: mol_type = other RNA; note = Related to JAKJHZ010000001.1
ctcgagacggcggaccggtgcgcgtcaccggcccacctctccggggataccccgggggccaccggaacgttcgggcacggcaccgcgcgcgaagcgctgcgctccgctgcaggagatcgcgcgcacgacgggacaggtcgagca

SEQ ID NO: 18264 - RNA, 144 nt, Nocardioides alpinus
  source 1..144: mol_type = other RNA; note = Related to FOKC01000001.1
ctcgagacggtgaaccggtgcgcgtcaccggttcgcttctccggggctaccccggggaccaccggaacgttcgggcactgcaccgcgcgcgactcgctgcgctccgctgcaggtcatcgcgcgcacgacgggacaggtcgagct

SEQ ID NO: 18265 - RNA, 144 nt, Nocardioides luteus
  source 1..144: mol_type = other RNA; note = Related to NZ_JZDQ02000022.1
ctcgagacggcgagccggtgcgtgacaccggtcagcctccccggggctaccccgggggccaccggtacatccgggcacggcaccgcgcgcgacaggctgcgctccgctgcaggtcgccgcgcgcacgacgagacaggtcgagga

SEQ ID NO: 18266 - RNA, 144 nt, Nocardioides lianchengensis
  source 1..144: mol_type = other RNA; note = Related to FMZM01000021.1
ctcgagacggccgaccggtgtgcgtcaccggccagcctccccggggctaccccggggaccaccggaacgttcgggcacggcaccgcgcgcgactcgctgcgctccgctgcaggtcttcgcgcgcacgacgggacaggtcgagca

SEQ ID NO: 18267 - RNA, 144 nt, Nocardioides salarius
  source 1..144: mol_type = other RNA; note = Related to JAFBBZ010000001.1
ctcgagacggtgagctggcgcgcgacgtcggtccacctccccggggctaccccgggggccaccggtacgtccgggcaccgcaccgcgcgcgagacgctgcgctccgctgcaggtcctcgcgcgcacgacgggacaggtcgggca

SEQ ID NO: 18268 - RNA, 144 nt, Nocardioides aquaticus
  source 1..144: mol_type = other RNA; note = Related to NZ_CP075371.1
cttgagacggtgagccggtgcgcgacaccggaccacctccccggggctaccccgggggtcaccggaacgttcgggcaccgcaccgcgcgcgagacgctgcgctccgctgcaggaagtcgcgcgcacgacgagacaggtcgagca

SEQ ID NO: 18269 - RNA, 144 nt, Nocardioides kribbensis
  source 1..144: mol_type = other RNA; note = Related to NZ_JADCLL010000001.1
ctcgagacggtggaccggtgcgtgacaccggcccgcctccccggggctaccccggggaccaccggcacgtccgggcacggcaccgcgcgcgagtcgctgcgctccgctgcaggaccccgcgcgcacgacgggacaggtcgagcc

SEQ ID NO: 18270 - RNA, 144 nt, Nocardioides litoris
  source 1..144: mol_type = other RNA; note = Related to NZ_VDMR01000001.1
ctcgagacggttggccgacgcgcgtcgtcggtccacctccccggggctaccccgggggccaccggcacgtccgggcacggcaccgcgcgcgacacgctgcgctccgcggcaggaagccgcgcgcacgacgggacaggtcgagcg

SEQ ID NO: 18271 - RNA, 144 nt, Nocardioides zeae
  source 1..144: mol_type = other RNA; note = Related to JAAGXA010000003.1
ctcgagacggtcaaccggtgcgcgtcaccggtcgacctccccggggctaccccggggaccaccggcacgtccgggcactccaccgcgcgcggctcgctgcgctccgctgcaggtctccgcgcgcacgacgggacaggtcgaggg

SEQ ID NO: 18272 - RNA, 144 nt, Nocardioides dongxiaopingii
  source 1..144: mol_type = other RNA; note = Related to NZ_SZVU01000003.1
ctcgagacggtgacctggcgcgagtcgccagttcacctccccggggctaccccgggggccaccggtacgtccgggcactgcaccgcgcgcgcctcgctgcgctccgctgcaggtccgcgcgcgcacgacgggacaggtcgagca

SEQ ID NO: 18273 - RNA, 144 nt, Antricoccus suffuscus
  source 1..144: mol_type = other RNA; note = Related to NZ_PVUE01000003.1
ttcgagaatgtcgatcggcgtacgacgtcgaacgacgtccccggggctaccccggggtcaaccggcatggccgggcacctcaccacgcgcgaggcactgcgcttcgcggcagctagtcgcgcgcacgacaggaatggtcgagcg

SEQ ID NO: 18274 - RNA, 144 nt, Leekyejoonella antrihumi
  source 1..144: mol_type = other RNA; note = Related to NZ_VCQV01000003.1
ttcgagacgggtgaccggcgcgcagcgtcggttcacctctccggggttaccccgggggttaccggtacgtccgggcactgcaccgcgcgcgagcggctgcgcttcgcggcaggaagtcgcgcgcacgacaggacaggtcgaaca

SEQ ID NO: 18275 - RNA, 145 nt, Sciscionella marina
  source 1..145: mol_type = other RNA; note = Related to NZ_KB905425.1
ctcgagaacggtcggcaggggcgtgacctcgctcgaccactcaggggttccccctgggatcaccggcagggtccggcagcgcaccgcgcgcgagccaccgcggaacgccgcagacattcgcgcgcacgacgtggttggtcgagtc

SEQ ID NO: 18276 - RNA, 132 nt, Geodermatophilus normandii
  source 1..132: mol_type = other RNA; note = Related to NZ_QGTX01000001.1
ggcaggacgaccggcagcgaccggtctcccggggcgaccccggggcagcaggtcatcgccaccatcggcaccacccgccggacggcgcgctccgcgcacgcaccggcgactcccacgcggagtggctgcccg

SEQ ID NO: 18277 - RNA, 132 nt, Blastococcus endophyticus
  source 1..132: mol_type = other RNA; note = Related to NZ_JABGCI010000002.1
ggcaggacgaccggcgagtccggtccctccggggcaaccccggggcagcacgtgtcagccaggcgcagcgtcacccgccggacggcgcgctccgcgcacgtcccggcgcctccctcagggagtggctgcccg

SEQ ID NO: 18278 - RNA, 132 nt, Geodermatophilus sp.
  source 1..132: mol_type = other RNA; note = Related to NZ_SPQN01000061.1
ggcaggacgatcggcgtcagccggtctccccggggcaaccccggggcaacgcagcgagtcgggcatcgcgtcacccgccagcaggcgcgctccgcgcacgccctggcgactccctcagggggcggctgcctc

SEQ ID NO: 18279 - RNA, 132 nt, Geodermatophilus obscurus
  source 1..132: mol_type = other RNA; note = Related to FRDM01000010.1
gtcgggacgaccggcgtcagccggtctccccggggctaccccggggcagcgcagcgagcagggcacggcgtcagccgccaccaggagcgctccgcgcacgacctggcgactccctcagggagcggctgcctc

SEQ ID NO: 18280 - RNA, 132 nt, Blastococcus colisei
  source 1..132: mol_type = other RNA; note = Related to NZ_VFQE01000001.1
ggcaggacgaccggtgaggaccggttctcccggggaaaccccggggatcgcactgttcccgaacatctcgtcaaccgccaggccgtgcgctccgcgcacctgatggcgcctcgttcaggggccggctgcccg

SEQ ID NO: 18281 - RNA, 132 nt, Blastococcus sp.
  source 1..132: mol_type = other RNA; note = Related to FOND01000013.1
ggcaggacgaccggtgaggaccggttctcccggggcaaccccggggatcgcactgttcccgagcatctcgtcaaccgccaggccgtgcgctccgcgcacctgatggcgcctcgatcaggggctggctgcccg

SEQ ID NO: 18282 - RNA, 132 nt, Modestobacter roseus
  source 1..132: mol_type = other RNA; note = Related to NZ_VLKF01000001.1
ggcaggacgaccggcgtggaccggtcaccccggggcaaccccgggggtcgtgttcggacccagcatctcgtcacccgcccggccgtgcgctccgcgcacctggtggcgcctcgatcaggggctggctggccg

SEQ ID NO: 18283 - RNA, 133 nt, Modestobacter caceresii
  source 1..133: mol_type = other RNA; note = Related to NZ_JPMX01000077.1
ggcaggacgaccggcagcagccggtcaccccggggcaaccccggggcatcgtgagcaggtcgggcatcgcgtcatgagccgcgctgtgcgctccgcgcaccaggcggcgcctccagcgaggagcggctggccg

SEQ ID NO: 18284 - RNA, 133 nt, Modestobacter excelsi
  source 1..133: mol_type = other RNA; note = Related to NZ_SJEX01000063.1
ggcaggacgaccggcacgagccggtccccccatggcaaccccggggcatcgtgagaagcccaggcacggcgtcatgagccggacggcgcgctccgcgcacgcaacggcacatcgcccagggacgggctggtct

SEQ ID NO: 18285 - RNA, 133 nt, Modestobacter muralis
  source 1..133: mol_type = other RNA; note = Related to JAAGWH010000033.1
gccaggacgaccggcagcgtccggtcaccccggggcaaccccggggacccgtgaagaggtcaggcacagcgtcatgagccatgccgtgcgctccgcgcacccagtggcacgtcccccagggactggctggtct

SEQ ID NO: 18286 - RNA, 134 nt, Blastococcus xanthinilyticus
  source 1..134: mol_type = other RNA; note = Related to NZ_VNHW01000003.1
ggcaggacgaccggcgaggagccggtccctccggggctaccccggggtctcgcagcagagctgggcgatgcgccacccgccggacggcgcgctccgcgcacgtcccggcacctccgtcagggagcggctgccct

SEQ ID NO: 18287 - RNA, 133 nt, unidentified
  source 1..133: mol_type = other RNA; note = Related to QHCB01000177.1; note = Pseudonocardiales bacterium
ggcaggttggtcgggaccacccgatcactccggggcaaccccggggtcatcactcgacgcaggccatcgcgtcgcacgcccgctactgcgccctacgcaagcctgggcgcgcacggcagggattggctgcctc

SEQ ID NO: 18288 - RNA, 133 nt, unidentified
  source 1..133: mol_type = other RNA; note = Related to JAFKEJ010000505.1; note = Actinomycetia bacterium
ggcaggacggtcgggctcgctcgaccactccggggcaaccccggggtcatcgaccggcaccacgcatcgcatcgcccgccacgaagttcacctcgtgaacgagccggcgggcacatcggaggttggctggccg

SEQ ID NO: 18289 - RNA, 132 nt, Jatrophihabitans endophyticus
  source 1..132: mol_type = other RNA; note = Related to NZ_FQVU01000005.1
ggcaggacgatcgggtgcaccgatctctccggggcaaccccgggggcgcaaccgcacgcgaggcactgcgtcgcgagccagggcctgcactgcgtgcagcggcaggcacgcacgacagcgaagggctaccgc

SEQ ID NO: 18290 - RNA, 135 nt, Actinoplanes abujensis
  source 1..135: mol_type = other RNA; note = Related to BOMC01000025.1
cctgagctggccgtcgcacgacgacggctcttcggggcaaccccgagggagttcgcttgaccaccacagcgcatcgccggcgcgccgcagcgcttcgcgcagggcggcgcaggcacgaccgggattcgtcggggc

SEQ ID NO: 18291 - RNA, 147 nt, Actinoplanes bogorensis
  source 1..147: mol_type = other RNA; note = Related to JAHKKG010000005.1
cccgagctggccgtcgcccgccggaaacggcggcgagggtctcttcggggtaaccccgagggcgtccagtgatcaccgcagcgcatcgccggcgcgcctcagcgcttcgcgcagcacggcgcaggcacgaccgggcttcgtcgggac

SEQ ID NO: 18292 - RNA, 147 nt, Actinoplanes sp.
  source 1..147: mol_type = other RNA; note = Related to NZ_JAHWFK010000003.1
cctgagctggccgtcgaccgccgttcgcggcggcgagggctcttcggggcaaccccgaggacgcttgattgagcaccgcagcgcatcgccggcgcgacgcagcgcttcgcgcggcactgcgcaggcacgaccgggaatcgtcagggc

SEQ ID NO: 18293 - RNA, 148 nt, Actinoplanes atraurantiacus
  source 1..148: mol_type = other RNA; note = Related to NZ_OBDY01000014.1
cccgagctcgaccgtcgcccgtcgttccggcggcgagggtctctccggggtaaccccggggaagcttgagtgaccaccgcagcgcatcgccggcgcgcctccgcgcttcgcgcagcccggcgcaggcacgaccgggaatcgtcggggc

SEQ ID NO: 18294 - RNA, 147 nt, Actinoplanes ianthinogenes
  source 1..147: mol_type = other RNA; note = Related to AP023356.1
cccgagctggccgtcgcacgccgttcccggcggcgagggctcttcggggtaaccccgaggacgcaggattgactaccgcagcgcatcgccggcgcgcgtcagcgcttcgcgcagcacggcgcaggcacgaccgggcatcgtcggggc

SEQ ID NO: 18295 - RNA, 149 nt, Actinoplanes sp.
  source 1..149: mol_type = other RNA; note = Related to NZ_JOJL01000057.1
cccgagctggcgctcgcccgtcgcttcgcggcggcgagggtctcttcggggtaaccccgaggaagcttgattgactaccgcagcgcatcgccggcgcgcttcagcgcttcgcgcagcacggcgcaggcacgaccgggattcgtcgggac

SEQ ID NO: 18296 - RNA, 135 nt, Actinoplanes tereljensis
  source 1..135: mol_type = other RNA; note = Related to NZ_BOMY01000054.1
cccgagctggccgccgcactccggtggctcttcggggtaaccccgaggaagcaggtttgactaccgcaccgcatcgccggcgcacgtccgcgcttcgcgcggctcggcgcaggcacgaccgggaatcgtcggggc

SEQ ID NO: 18297 - RNA, 147 nt, Actinoplanes sp.
  source 1..147: mol_type = other RNA; note = Related to NZ_RJAC01000023.1
cccgagctcgccgtcggccgtcgttcgcggcggcgatggctcttcggggtaaccccgaggacgtttctgtgagcaccgcagcacaccgccggcgcgcttccgcgcttcgcgcagtccggcgcaggcacgaccgggaatcgtcggggc

SEQ ID NO: 18298 - RNA, 147 nt, Actinoplanes ovalisporus
  source 1..147: mol_type = other RNA; note = Related to JAENHP010000015.1
cccgagctggccgtcgtccgccgtgagcggcggcgagggctcttcggggtaaccccgaggaagcaggattgaccaccgcagcgcatcgccggcgcgccgcagcgcttcgcgctggacagcgcaggcacgaccgggaatcgtcggggc

SEQ ID NO: 18299 - RNA, 150 nt, Actinoplanes sp.
  source 1..150: mol_type = other RNA; note = Related to NZ_QHHV01000069.1
cccgagctgaccgtcgcgcgccgtccgcggcgcgccgagggtctcttcggggtaaccccgagggcgcaggattgatcaccgcagcgcatcgccggcgcgcccctgcgctccgcgcaggacggcgcaggcacgaccgggcatcgtcggggc

SEQ ID NO: 18300 - RNA, 150 nt, Actinoplanes auranticolor
  source 1..150: mol_type = other RNA; note = Related to BOQL01000058.1
cccgagctgaccgtcgcgcgccgcccgcggcgcgacgagggtttcttcggggtaaccccgagggcgcaggattgaccaccgcagcgcatcgccggcgcgcctctgcgcttcgcgcagctcggcgcaggcacgaccgggcatcgtcggggc

SEQ ID NO: 18301 - RNA, 128 nt, Actinoplanes friuliensis
  source 1..128: mol_type = other RNA; note = Related to NC_022657.1
cccgagctgaccctcacgggtctctccggggtaaccccggggcgaacaggtgactaccgcagcgcatcgccggcgcctcgccgcgcttcgcgcgagaacgcgcaggcacgaccgggtttcgtcggggc

SEQ ID NO: 18302 - RNA, 137 nt, Couchioplanes caeruleus
  source 1..137: mol_type = other RNA; note = Related to NZ_RJKL01000001.1
cccgagctggccgccggtccgccgacggcctctccggggtacccccgggggcgagagattgagccacgcagcgcatcgccggcgcgccgccgcgctccgcgcgggacagcgcaggcacgaccgggcaacgtcggggc

SEQ ID NO: 18303 - RNA, 139 nt, Actinoplanes sp.
  source 1..139: mol_type = other RNA; note = Related to CP005929.1
ggcgagccggccgccggtacaccgacggtctctccggggcacccccgggggcgcacatccttcgctgggcagcacaccgccggcacgtcattcgcgctccgcgcgagccggtgcgggcacgaccaggcatcgtcggccc

SEQ ID NO: 18304 - RNA, 135 nt, Actinoplanes sp.
  source 1..135: mol_type = other RNA; note = Related to NZ_LOJP01000001.1
cccgagctgaccgtcgcttcggcgaggtctctccggggcacccccggggacgaaagtgtgagttcgcaccgcaccgccggcactcgcccgcgcttcgcgcgacaccgtgcaggcacaaccgggattcgtcgggac

SEQ ID NO: 18305 - RNA, 138 nt, Actinoplanes humidus
  source 1..138: mol_type = other RNA; note = Related to NZ_BOMN01000001.1
cccgagcttgaccgccggtccgccgacggtctctccggggcaaccccgggggcgacatgatcagccaggcacagcaccgccggcgtgcccccgcgctccgcgcggcacgacgcaggcacaaccgggcatcgtcgggcc

SEQ ID NO: 18306 - RNA, 150 nt, Virgisporangium ochraceum
  source 1..150: mol_type = other RNA; note = Related to NZ_BOPH01000102.1
cccgagctggccggagcgcgtcgtccgcggcgcgccgacggcctcttcggggcaaccccgaggacgacgcagtgagcaccgcagcgcatcgccggcgcgcatccgcgctccgcgcaggacggcgcaggcacgacggggcatcgtcgggac

SEQ ID NO: 18307 - RNA, 150 nt, Virgisporangium aurantiacum
  source 1..150: mol_type = other RNA; note = Related to NZ_BOPG01000148.1
cccgagctggccggagcgcgccgttcacggcgtgccgacggcctcttcggggcaaccccgaggacgacgcagtgagcacggcagcgcatcgccggcgcgcaccagcgcttcgcgcaggacagcgcaggcacgacggggcatcgtcgggac

SEQ ID NO: 18308 - RNA, 138 nt, Pseudosporangium sp.
  source 1..138: mol_type = other RNA; note = Related to NZ_JADMLH010000017.1
cccgagcaggccgccggatcgccgacggtctctccggggcacccccgggggcgagcacattgagccacgcagcgcttcgccggcgcgccaccgcgctccgcgcgagacagcgcaggcacgaccgggcatcgtcggggc

SEQ ID NO: 18309 - RNA, 129 nt, Dactylosporangium aurantiacum
  source 1..129: mol_type = other RNA; note = Related to NZ_JNYJ01000032.1
cccgagcagaccagcgatggtcgctccggggtaaccccggggacgcaggattgagcacggcagcacatcgccggcgcgcctccgcgcttcgcgcgactctgcgcaggcacgaccgggattcgtcggggc

SEQ ID NO: 18310 - RNA, 135 nt, Dactylosporangium vinaceum
  source 1..135: mol_type = other RNA; note = Related to NZ_CP061913.1
cccgagctgatcgcggctcgccgtgatcgctccggggcaaccccgggggcgcagtgatgagcaccgcagcacaccgccggccctcagccgcacttcgtgcgacaccgggcaggcacgaccgggcaacgtcggggc

SEQ ID NO: 18311 - RNA, 135 nt, Dactylosporangium sucinum
  source 1..135: mol_type = other RNA; note = Related to NZ_BMPI01000004.1
cccgagccggccaggggcgaccttggcctctccgggggaaccccggggacgcaggattgagcaccgcacagcaccgccggcccgacgccgcgctccgcgcaggccagggcaggcacgaccgggtgtcgtcggggc

SEQ ID NO: 18312 - RNA, 153 nt, Micromonospora sp.
  source 1..153: mol_type = other RNA; note = Related to NZ_JAGGJO010000001.1
cccgagctgaccaggccggccccccacgtggggtccggtcatggtctctccggggcaaccccggggacggactactcacctcggcaccacaccacaggtgcgtcggcacgctccgcgagcctgtgcacccgcacgaccgggcatcgtcgggac

SEQ ID NO: 18313 - RNA, 153 nt, Micromonospora orduensis
  source 1..153: mol_type = other RNA; note = Related to VDFY01000230.1
cccgagctgaccaggccgctcccccacgtggagtccggtcacggtctctccggggcaaccccggggacgcgatactcacctcggcaccacaccacaggtgcgtcggcacgctccgcgagcctgtgcacccgtacgaccgggcatcgtcgggac

SEQ ID NO: 18314 - RNA, 153 nt, Micromonospora globbae
  source 1..153: mol_type = other RNA; note = Related to NZ_RAQQ01000031.1
cccgagctggccaggctgcgtccccgcgtggggcgcggtcacggtctctccggggtaaccccggggacgtcacactcacctcggcaccacaccacaggtgcgtcggcacgctccgcgagcctgggcacccgcacgaccgggcatcgtcgggac

SEQ ID NO: 18315 - RNA, 153 nt, Micromonospora craterilacus
  source 1..153: mol_type = other RNA; note = Related to POTY01000051.1
cccgagctgaccaggccgctcccccaggcggggcgcggtcacggtctctccggggcaaccccggggacgcaacactcacccaggcaccacaccacaggtgcgtcggcacgctccgcgagcctgtgcacccgcacggccgggcatcgtcgggac

SEQ ID NO: 18316 - RNA, 153 nt, Asanoa ferruginea
  source 1..153: mol_type = other RNA; note = Related to NZ_QUMQ01000001.1
cccgagctgaccgtgccgcgtctccgctggaggcggggcgatggtctctccggggcaaccccgggggcgtgttgtctacctgagcaccacaccgcaggtgcgcgggcacgcttcgcgaacctctgcacccgcacgaccgggcatcgtcggggc

SEQ ID NO: 18317 - RNA, 141 nt, Asanoa iriomotensis
  source 1..141: mol_type = other RNA; note = Related to NZ_BONC01000044.1
cccgagccgaccgtgccgcgcgtcggccacggtctctccggggcaaccccgggggcgtgtcacctacctgagcaccacaccgcaggtgcgccagcacgcttcgcgagcctctgcacccgcacgaccgggcatcgtcgggac

SEQ ID NO: 18318 - RNA, 153 nt, Micromonospora coriariae
  source 1..153: mol_type = other RNA; note = Related to NZ_LT607412.1
cccgagctgacctggccgcgcccccaccggggacgcggtcggagtctctccggggcaaccccgggggcggcacatccacctgggcaccacaccacaggtgcgtcggcacgctccgcgagcctgtgcacccgtacgaccgggattcgtcggggc

SEQ ID NO: 18319 - RNA, 144 nt, Polymorphospora rubra
  source 1..144: mol_type = other RNA; note = Related to NZ_AP023359.1
cccgagctgaccaggccgcgtccgcgcggtcccggtctctccggggaaaccccggggacgtcacccgtaccaccgcatcgcgtcgcctgcgctccggtgcgctccgcgcacgtccgcgcacgcacgaccgggcctcgtcgggac

SEQ ID NO: 18320 - RNA, 151 nt, unidentified
  source 1..151: mol_type = other RNA; note = Related to JADGGF010000365.1; note = Micromonosporaceae bacterium
cccgagctgaccaggacgccgtcctcggcgacggcccaccggtctctccggggtaaccccgggggcgtcacaggtatctccccgcggcaccacatgcgcgacccggcgcttcacgccgcacggcgcacgtacgacagggaaccgtcggggc

SEQ ID NO: 18321 - RNA, 143 nt, unidentified
  source 1..143: mol_type = other RNA; note = Related to JAHBSN010000079.1; note = Actinomycetia bacterium
accgagtcggtcggatggagcttcggcgtcgtccgacctctccggggcacccccggggacgaccacgtggtcacacatcgcatcgccggcgcgctcgcgcactccgtgcgcccaggcgccagcacgacaggacgggtcgggag

SEQ ID NO: 18322 - RNA, 134 nt, unidentified
  source 1..134: mol_type = other RNA; note = Related to JAFAZI010000149.1; note = Frankiaceae bacterium
tacgagctcgtcgaggtcgcactcgaccgccccggggctaccccggggttgattcgtcatgtcaggcattccttcgcacgtgcggcggcgcactccgtgcacgcaagcacgcgcacggcaggactggtcggacg

SEQ ID NO: 18323 - RNA, 133 nt, Amycolatopsis dendrobii
  source 1..133: mol_type = other RNA; note = Related to JACGZW010000002.1
ggtgagccggtggaggaccacccactccggggcaaccccggggagcagcacgacacgtacccacagcgccccgcgcagcggcggcacgctccgcgtgcgagacagcgcggatgaacggagaacgagtcgcctc

SEQ ID NO: 18324 - RNA, 133 nt, Amycolatopsis sulphurea
  source 1..133: mol_type = other RNA; note = Related to NZ_PDJK01000002.1
ggtgagccggtggaacaccacccactccggggcaaccccggggagcagtacggcacgcaaacaccgcaccccacgcgaacgcggcacgctccgcgtacaagaccgcgcggatgaacggagaaagagtcacctc

SEQ ID NO: 18325 - RNA, 134 nt, Amycolatopsis sp.
  source 1..134: mol_type = other RNA; note = Related to NZ_CP080519.1
ggtgagcccggtggagaaccaccccttccggggcaaccccggaacgcaccacatcacccgatcacagcgccccacgcgagggcggcacgctgcgcgtacaagaccgcgcggatgaacggagaaagagtcacccc

SEQ ID NO: 18326 - RNA, 134 nt, Amycolatopsis saalfeldensis
  source 1..134: mol_type = other RNA; note = Related to NZ_FOEF01000001.1
ggtgagcccggtggagaaccaccctctccggggttaccccggggtgcacgaggacacgcaggcacagcgccccgcgcgaacgcggcacgctccgcgtacaggaccgcgcggatgaacggagaatcagtcacctc

SEQ ID NO: 18327 - RNA, 133 nt, Amycolatopsis keratiniphila
  source 1..133: mol_type = other RNA; note = Related to NC_021252.1
ggtgagccggtggatcaccacccactccggggcaaccccggggagtacgaagtcagccaggcaaggcgccccgcgcgagcgcggcatgcttcgcgtacgagtccgcgcggatgacaggagaaagagtcacccc

SEQ ID NO: 18328 - RNA, 133 nt, Amycolatopsis nigrescens
  source 1..133: mol_type = other RNA; note = Related to NZ_ARVW01000001.1
ggtgagcaggtggaacaccacccactccggggcaaccccggggagcacgaggacacgcaggcatcgcgccccgcgcgaacgcggcacgcttcgcgtacaagaccgcgcggatgaacggagaaaaggtcacctc

SEQ ID NO: 18329 - RNA, 137 nt, Amycolatopsis xylanica
  source 1..137: mol_type = other RNA; note = Related to NZ_FNON01000006.1
gatgagcaaggtggagcgatccgcccgctccggggcaaccccggggcgcaccatggcacccgcgcacggcaccccacgccgatggggcacgctccgcggacgacgcggcgcggtcgaacggagaacgaggtcatctc

SEQ ID NO: 18330 - RNA, 133 nt, Amycolatopsis acidiphila
  source 1..133: mol_type = other RNA; note = Related to CP090063.1
ggtgagcaggtggatcaccaccccctccggggcaaccccggggagcttcaggacacgcaggtatggcgccccacgcgaacgcggcacgcttcgcgtacagaaccgcgcggatgaacggagaaaaggtcacctc

SEQ ID NO: 18331 - RNA, 135 nt, Amycolatopsis antarctica
  source 1..135: mol_type = other RNA; note = Related to NZ_NKYE01000001.1
ggtgagcaggtgggagttcccgcccgctccggggcaaccccggggagatcgaccagaggtaggcatcgcgccccacgcgcgcgagcatgctccgcgtacctgatgcgcgcggagacacggagaaaaggtcacccc

SEQ ID NO: 18332 - RNA, 135 nt, Prauserella cavernicola
  source 1..135: mol_type = other RNA; note = Related to NZ_JAENJH010000016.1
ggtgagcaggtgggaggacccacccactccggggcaaccccggggagctcgacatcggatgacgatcgcgccccacgcgcgtacgcatgctccgcgtggctccggcgcgaggacgaacggagatgcggtcacctc

SEQ ID NO: 18333 - RNA, 135 nt, Prauserella flavalba
  source 1..135: mol_type = other RNA; note = Related to NZ_MASU01000002.1
ggtgagcaggtgggacgacccacccactccggggcaaccccggggagctcgacatcggcagggcaccgcgccccacgcgcgcccgcatgctccgcgtggcccaagcgcgcggacgaacggagacgaggtcacctc

SEQ ID NO: 18334 - RNA, 135 nt, Prauserella muralis
  source 1..135: mol_type = other RNA; note = Related to VIVS01000002.1
ggtgagcaggtggggtcacccacccactccggggcaaccccggggagcccggcatcggttgagcactgcgccccacgcgcggcgccatgctccgcgtgcgatcggcgcgcgggagagcggagacgaggtcacctc

SEQ ID NO: 18335 - RNA, 140 nt, Amycolatopsis sp.
  source 1..140: mol_type = other RNA; note = Related to NZ_CP059997.1
ggtgagcagatggggacacccatccctccggggcaaccccggggagcacgaccacgctgaggcacggcgccccacgcgcgtgtgcacgctgcgcgtacctgttgggagcgcgcggacggccacgggagaaaggtcacctc

SEQ ID NO: 18336 - RNA, 141 nt, Amycolatopsis anabasis
  source 1..141: mol_type = other RNA; note = Related to NZ_VTHK01000003.1
ggtgagcaggcggggtcacctgcccactccggggcaaccccggggagcacgacgaaacccaggcatcgcgccccacgcgcgacagcacgctccgcgtacgccttggtgcgcgcggcagaacaggggagaaacggtcacctc

SEQ ID NO: 18337 - RNA, 144 nt, Crossiella cryophila
  source 1..144: mol_type = other RNA; note = Related to NZ_JACHMH010000001.1
agcgagacgaggggtggcccagtgctcgcccttccctccggggataccccggggagcagtgtttcagctggtcagtgcgccccgcgtggatcggcacgctccgcgtgcgagccccacgcggctcacgatggcagaggtcgcccc

SEQ ID NO: 18338 - RNA, 135 nt, Saccharothrix variisporea
  source 1..135: mol_type = other RNA; note = Related to NZ_RBXR01000001.1
agcgagcaggcggttggaacaccgcccctcaggggcaacccctgggagcacgacccgaagaacccactgcgccccaggcagaacggcacgctccgcgtgcttggctgcccgaagtggcggagaaggcgtcgcgcc

SEQ ID NO: 18339 - RNA, 136 nt, Kibdelosporangium persicum
  source 1..136: mol_type = other RNA; note = Related to JAAATY010000004.1
ggtgagcacggtggtgaacaccacccctctggggttaccccagggagcacggcattaccggaggatggcgccccacgcgcgacggcacacgctgtgtacgtgcgtgcgcgcggacatcgggagaacgagtcactcc

SEQ ID NO: 18340 - RNA, 136 nt, Kibdelosporangium phytohabitans
  source 1..136: mol_type = other RNA; note = Related to JADBEI010000001.1
ggtgagcacggtggtgagaaccacccctctggggataccccagggagcaaggcattacctgcggttggcgccccacgcgcggcggcacactccgtgtacgtgggtgcgcgcggatatcgggagatggagtcactcc

SEQ ID NO: 18341 - RNA, 136 nt, Kibdelosporangium aridum
  source 1..136: mol_type = other RNA; note = Related to NZ_FWXV01000002.1
agtgagcacggtggtgaacaccacccctctggggctaccccagggagcacggatttacctgcggatggcgccccacgcgcgacagcacacgctgtgtacgcatgggcgcgcggatatcgggagaacaggtcacttc

SEQ ID NO: 18342 - RNA, 133 nt, Kibdelosporangium banguiense
  source 1..133: mol_type = other RNA; note = Related to JAGINW010000001.1
ggtgagcaggtggaacatcacccctccggggtaaccccggggagcacggtattatctgggcatgacaccccacgcgcgtcggtacgctccgcggatccaggggcgcgcggatatcgggagaaagagtcacttc

SEQ ID NO: 18343 - RNA, 142 nt, Saccharopolyspora erythraea
  source 1..142: mol_type = other RNA; note = Related to AM420293.1
gccgaggcgtccggtgccgggcgggcaccgctccgaggcaacctcggggagtaccaacgcagtcgagcacggcgtccgacgcgccactgggagacgctgccgcgtctgtccgcgcgccggggaacgcagatcgggtcgccgc

SEQ ID NO: 18344 - RNA, 140 nt, Kutzneria albida
  source 1..140: mol_type = other RNA; note = Related to NZ_CP007155.1
agcgagcaggcgggcaaccgtcactccggggcaaccccggggagcaccaccacagcggggcatggcgccccgcgcgcaacaccaccgctgcacgctccgcgtgaccaccgcgcgcggccgtggcgagaacaggtcgccgc

SEQ ID NO: 18345 - RNA, 158 nt, Pseudonocardia sp.
  source 1..158: mol_type = other RNA; note = Related to NZ_JAJGSX010000003.1
aacgagacggcgagaacctgcccgtgcacgtcacggcaggccttgctgctccggggcaaccccggggtgcaccacttctgcgcagcatggcgtcccgcgcgcgcgaggcacaggaagagtgccgacggcgcgcggcggacgggaacaccggtcgctcg

SEQ ID NO: 18346 - RNA, 158 nt, Pseudonocardia xinjiangensis
  source 1..158: mol_type = other RNA; note = Related to NZ_JAAXKY010000083.1
gacgagacggcgagcacccgcccaagcaccacccggcgggtctcgtggctccggggcaaccccggggtgcaccacctctctgcggcatggcgtcccgcgcaccccgggcacgaacgcagtgccgtcagtgcgcggccgacgggaacaccggtcgtcgc

SEQ ID NO: 18347 - RNA, 152 nt, Pseudonocardia oceani
  source 1..152: mol_type = other RNA; note = Related to NZ_JADQDF010000001.1
gtcgagacggcgagcacccggcccccacggcgggtctcgtggctccggggcgaccccggggtgcaccacctcagtgcggcacggcgtcccacgcaggacgggcaggtacggcatgccccctctgcgcggcggacgggaacaccggtcgtccg

SEQ ID NO: 18348 - RNA, 152 nt, Pseudonocardia sp.
  source 1..152: mol_type = other RNA; note = Related to NZ_CP013854.1
gacgagtgggcggtcgtcccggctccggccggggcccgcggctccggggtgaccccggggtgcaccggtactgcgcagcacggcgtcccgcgcgcgtcgggcaggacagcgctgcctgcggcgcgcggcggacagcgaacacgggtcgtcgg

SEQ ID NO: 18349 - RNA, 124 nt, Pseudonocardia sp.
  source 1..124: mol_type = other RNA; note = Related to BEGX01000057.1
ggcgcggatcgcggctccggggaaaccccggggtgcaccacctcagcgggccatcgcgtcccgcgcgtgcggtcactgctcccgcgtgagtctgcgcgcggcggacaggaacccaggtcgaccg

SEQ ID NO: 18350 - RNA, 129 nt, Pseudonocardia sulfidoxydans
  source 1..129: mol_type = other RNA; note = Related to NZ_BJVJ01000106.1
gtcgcggctcggatcgcggccccggggcaaccccggggtgcaccggttcagcggggcacggcgtcccgcgcgcgtggtcactgctcgcgcgtgagtctgcgcgcggcggacaggaacacaggtcgaccg

SEQ ID NO: 18351 - RNA, 163 nt, Pseudonocardia dioxanivorans
  source 1..163: mol_type = other RNA; note = Related to CP002593.1
gacgagtcggcggtccggtgtggtggtctcggccaccacggcgcggaccgcggctccggggcaaccccggggtgcaccttctcagcgggactcggcgtcccgcgcgcgtggtcactgctcccgcgtgagtctgcgcgcggcggacaggaacccaggtcgaccg

SEQ ID NO: 18352 - RNA, 154 nt, Pseudonocardia oroxyli
  source 1..154: mol_type = other RNA; note = Related to NZ_FNBE01000010.1
gacgagtcggcgaaccgtcgggccctcgggcccggccttcgcggctccggggcaaccccggagtgcaccatccctgcaccgcacggcgtcccgcgcgcggcggcccgcaccacggggacgtgggcgcgcggcggacgagagcccaggtcgtacg

SEQ ID NO: 18353 - RNA, 145 nt, Pseudonocardia acaciae
  source 1..145: mol_type = other RNA; note = Related to NZ_JIAI01000002.1
gtggagtcggcgtgggccccgttcgcggggcggcgtcggtccggggcaaccccgggcagcaggtactcagcaccgcatggcgtcccgcgcgcgaccgcacggttggtgccccggcgcgcggatgacagggagaaccggtcctccg

SEQ ID NO: 18354 - RNA, 144 nt, unidentified
  source 1..144: mol_type = other RNA; note = Related to REAM01000105.1; note = Betaproteobacteria bacterium
gtctagctttgttgcaatcgattcttcgatgacattgcggacgcgcggggttaccccgcgtgacaacttatcgatactttcccggcgcggttggcggtgcgtcttcgccgcacacataaccgcgatccgacacgcggtagacgc

SEQ ID NO: 18355 - RNA, 132 nt, unidentified
  source 1..132: mol_type = other RNA; note = Related to JAHQVJ010000021.1; note = Myxococcales bacterium
cccgagcatccgaggtctcgatctcgaccctggggctaccccagggctgttccacaacctagcttccaccggcccacggcacgcgctgcgcgttgcgcagaacacgccgcggcgggccagatccgtcgggga

SEQ ID NO: 18356 - RNA, 129 nt, unidentified
  source 1..129: mol_type = other RNA; note = Related to JACKEN010000003.1; note = Deltaproteobacteria bacterium
tccgagtgatggggtcttggacctccctccgggggacccccgggggcgtaaactgagcttgcatctacgtcaccgcggcctcggtccgcggtcacggacggcagccgcggcagaccggcgagtcggggt

SEQ ID NO: 18357 - RNA, 132 nt, Thalassoglobus polymorphus
  source 1..132: mol_type = other RNA; note = Related to NZ_CP036267.1
cataagcttggtccgcaaggacactgtggggttaccccacgggagaaacgttgttcgagattcgtcggatgaagctgtgtgacggaaagcattgtttccgtcacacagcttcgccacaggatgcgttgtgca

SEQ ID NO: 18358 - RNA, 132 nt, Planctomicrobium sp.
  source 1..132: mol_type = other RNA; note = Related to JABJMI010000419.1
cataagcttggtccgtaaggacactgtggggttaccccacgggagaaacgttgttcgtgattcgtcggtagacctttgctaaccgaaagcattgtttcggttagcaaaggtcgccacaggatgcgttatgca

SEQ ID NO: 18359 - RNA, 130 nt, Thalassoglobus neptunius
  source 1..130: mol_type = other RNA; note = Related to NZ_SIHI01000002.1
cacaagccttgtccgttggacactgcggggttaccccgcgggagaagtgttgttcccgattcgatggatgaaggttctcaacgccaagcaagtttgcgttcagaaccttcgccacaggatgcgttgtgcg

SEQ ID NO: 18360 - RNA, 129 nt, Planctomicrobium piriforme
  source 1..129: mol_type = other RNA; note = Related to NZ_FOQD01000010.1
cacaagcccggtcctctggacactgtggggttaccccacgggagaatcgttgctccgcattcggcggatgaatgttgaccacggtacgacttgtaccgtcgcaacatacgctacaggattcgttgtgca

SEQ ID NO: 18361 - RNA, 129 nt, unidentified
  source 1..129: mol_type = other RNA; note = Related to JAGQPW010000040.1; note = Planctomycetaceae bacterium
cacaagctctgtccctcgggacattgtggggataccccacgagagatgcgttgttcgattctcatcggtagaagattgccgacgggcagaattgcccgtcgcaatcttcgccacaggattcgttgtgcg

SEQ ID NO: 18362 - RNA, 129 nt, unidentified
  source 1..129: mol_type = other RNA; note = Related to JAGQQB010000156.1; note = Planctomycetaceae bacterium
cacaagccctgtccttcgggacattgtggggttaccccacgagtgaagtgttgttcgattctcattggaagaagcttggcagcgacgagatgtcgtcgccgcaagcttcgccacaggattcgttgtgcg

SEQ ID NO: 18363 - RNA, 122 nt, Maioricimonas rarisocia
  source 1..122: mol_type = other RNA; note = Related to NZ_CP036275.1
cacaagctcacaggtctgtggggctaccccacggcagaagcgttgaccgcatctcgttgcaggaatttgtcgcaacgaagacgattcgttgcagacaaattcgccacaggatccgttgtgcg

SEQ ID NO: 18364 - RNA, 130 nt, unidentified
  source 1..130: mol_type = other RNA; note = Related to JAGQQF010000427.1; note = Planctomycetaceae bacterium
cccaagctcagtccttcgggacgctgtggggataccccacggaagaagcgttgagagcatctcgtcgcgtgagtttgcaaccgacgagtcgtttcgtcggtcgcaaactcgccacaggatccgttgggcg

SEQ ID NO: 18365 - RNA, 148 nt, unidentified
  source 1..148: mol_type = other RNA; note = Related to JABISG010000096.1; note = Planctomycetaceae bacterium
cacaagaatgttcgcagtcaccttgattggtgattccggacgctgcggggttaccccgcggaagaagcgttgttcgacattcgccgcgacaatgtccttcggttaagagctttaaccgacggacattcgccacaggatcggttgtgcg

SEQ ID NO: 18366 - RNA, 133 nt, unidentified
  source 1..133: mol_type = other RNA; note = Related to JAGQPX010000026.1; note = Planctomycetaceae bacterium
gataagctgttgccgtcttcggcactgtggggttaccccacgggagaatcgttgttcccatctcgtcgcgtgaatctgtgaacggcaaagccttgtttgccgttcacagattcgccacaggatccgttacccg

SEQ ID NO: 18367 - RNA, 121 nt, unidentified
  source 1..121: mol_type = other RNA; note = Related to JAEUIG010000100.1; note = Planctomycetaceae bacterium
cataagctctcaggtctgtggggttaccccacggcagaaggcgtgtctttcattcgacagtgaggagtcacggattcggactctcgaatccgtcacacctcgccacaggatgcgttgtgcg

SEQ ID NO: 18368 - RNA, 123 nt, unidentified
  source 1..123: mol_type = other RNA; note = Related to QQVO01000002.1; note = Planctomycetes bacterium
cacaagctgtcaggtctgtggggctaccccacggcagaagcgttgttcgtcattcatgcgtgagcaaacgcgctgattgtggctcacaatcagcggtttgcccgccacaggatgcgttgtgcg

SEQ ID NO: 18369 - RNA, 136 nt, Caulifigura coniformis; identical to SEQ ID NO: 17810
  source 1..136: mol_type = other RNA; note = Related to NZ_CP036271.1

SEQ ID NO: 18370 - RNA, 133 nt, Planctomyces sp.
  source 1..133: mol_type = other RNA; note = Related to JAHBXW010000001.1
cacaagcgttggtcctttcgaggacgctgcggggcaaccccgcggtagaagcgttgacgatcattcatccgagaatttgtgctcggcaatgcgttgtttgccgagacaaattcgccacaggattcgttgtgcg

SEQ ID NO: 18371 - RNA, 151 nt, unidentified
  source 1..151: mol_type = other RNA; note = Related to VGXY01000890.1; note = Planctomycetes bacterium
cacaagctcgattcgcacgttcctgaccggaacgtgacgaatgctgcggggttaccccgtggtcgctgcgttgttcgagattcgtggtgtgaattgtcggacggagtcgtcagtaactccgtcgacaattcgctacgggatcagttgtgcg

SEQ ID NO: 18372 - RNA, 148 nt, unidentified
  source 1..148: mol_type = other RNA; note = Related to JACMJF010000970.1; note = Candidatus Saccharimonas sp.
cacaagctcgattcgcgcgtccctgaccggacgtgtcgaatgctgcggggttaccccgcggtcgccgtgttgttcgagattcgtggtgtgaattgtcggtgtggtggacctcaccacaccgacaattcgctacgggatcggttgtgcg

SEQ ID NO: 18373 - RNA, 151 nt, unidentified
  source 1..151: mol_type = other RNA; note = Related to JAFEBS010000049.1; note = Planctomycetes bacterium
cacaagttcaattcgcacgtccctgaccggacgtgatgaatgctgcggggttaccccgcggtcgctgcattgctcgggattcgtggtgtgaattgtcggcaacggtggactcatcaccgttgcgacaattcgctacgggatcggttgtgcg

SEQ ID NO: 18374 - RNA, 150 nt, unidentified
  source 1..150: mol_type = other RNA; note = Related to QWPM01000121.1; note = Planctomycetes bacterium
cacaagacacgtttggcctccctgacgggatgagctgaacactgcggggttaccccgcggtcgctgagttgttcctcaatcgagctgtgaagagccggcgacggtagacctcttaccgccgcggctcttcgccacgggatcggttgtgcg

SEQ ID NO: 18375 - RNA, 150 nt, Schlesneria paludicola
  source 1..150: mol_type = other RNA; note = Related to NZ_JH636437.1
cacaagacacgtttggccgtccctgttcgggatgtgctaaacactgcggggttaccccgcggtcgcagagttgttcctcaatcgagctgtgaagagctgtgacggtagtcgataccgtcaacagctcttcgccacgggatcggttgtgcg

SEQ ID NO: 18376 - RNA, 127 nt, unidentified
  source 1..127: mol_type = other RNA; note = Related to QWPB01000058.1; note = Planctomycetes bacterium
gccaagccttggtccttcgggacactgcggggataccccgtggaagactcgttgttcgacattcaccgtgagtttgttcaagctgtgcgtacagtttgaacaaactcgccacaggatgcgttgagtg

SEQ ID NO: 18377 - RNA, 131 nt, unidentified
  source 1..131: mol_type = other RNA; note = Related to QWOR01000226.1; note = Planctomycetes bacterium
gccaagcttttgtccttcgggacgctgcggggttaccccgtgggagactcgttgttggtcattcaacgtgagtttgccggagttgagcttgtcgtcatctccagcaaactcgacacaggatgcgttgtgcg

SEQ ID NO: 18378 - RNA, 143 nt, Planctomyces sp.; identical to SEQ ID NO: 17808
  source 1..143: mol_type = other RNA; note = Related to NZ_CP011270.1

SEQ ID NO: 18379 - RNA, 146 nt, unidentified
  source 1..146: mol_type = other RNA; note = Related to JADZEF010000283.1; note = Planctomycetaceae bacterium
cccaagctcagttcgcccgtccgcaaggatcgtcgaacgctgcggggataccccgtggaagcagtcatgtccgccattcgtggcgtgaatggtcgctccggacgcactggtccgttgcaaccattcggcacaggatccgttgtgcg

SEQ ID NO: 18380 - RNA, 142 nt, unidentified
  source 1..142: mol_type = other RNA; note = Related to JAGQPV010000469.1; note = Planctomycetaceae bacterium
cacaagtcctgttcgccagacctgttctgtcgagcactgcggggttaccccgcgggagacgcattgcgcggcattcgatccgcgaataatcggtcaggacgtccgtcctgatccgattattcggcacaggaacagttgtgcg

SEQ ID NO: 18381 - RNA, 143 nt, unidentified
  source 1..143: mol_type = other RNA; note = Related to JACCRE010000317.1; note = Planctomycetaceae bacterium
cccaagcatcgcccggggctgaaagactgcccccggcaccgcggggctaccccgcggcagacgcgttgctcaccattcgaggcgtgagccaatccgcggaccgctgggaccgcagactggctcggcacaggaccggttgggcg

SEQ ID NO: 18382 - RNA, 149 nt, Rubinisphaera brasiliensis
  source 1..149: mol_type = other RNA; note = Related to NC_015174.1
cataagctcggctcgcctgttcagcattcctgaacctgcgagcgctgtggggataccccacggtcgactcattgctggctttccgcactgaatgaaacagtggttgggctttcaaccaccgtcccattcgcgacaggatcggttattca

SEQ ID NO: 18383 - RNA, 148 nt, unidentified
  source 1..148: mol_type = other RNA; note = Related to JAGQQR010000004.1; note = Planctomycetaceae bacterium
cataagctcggtctgcagggagtttaattatgacttgcagacgctgtggggttaccccatggtcgactcattgccggctttccggattgaatgaaacagcgggtggacattcacccgccgtcccattcgcgacaggatcggttattcg

SEQ ID NO: 18384 - RNA, 134 nt, unidentified
  source 1..134: mol_type = other RNA; note = Related to JAGQQT010000159.1; note = Planctomycetaceae bacterium
cataagctcggcttgtttcggcaagcgctgtggggttaccccacggtcgaatcattgttgacttctcgtcaggaaccaaagaccagtccggtcaccggactggtactttggttcgggacaggatcggttatccg

SEQ ID NO: 18385 - RNA, 133 nt, Rubinisphaera italica
  source 1..133: mol_type = other RNA; note = Related to NZ_SJPG01000001.1
cataagctcggcttgcttcggcaagcgctgtggggttaccccatggtcgaatgattgttgacatttcgataggaatgaagccgtggcttggacgacaagccacagcttcattcgcgacaggatcggttatccg

SEQ ID NO: 18386 - RNA, 140 nt, Rubinisphaera sp.
  source 1..140: mol_type = other RNA; note = Related to JAKFGB010000009.1
cataagctcggcttgcaggcaactgcaggcgctgtggggttaccccatggtcgattgattgttgactttacgattggaatgaaaaggcggcttgggctttcaagccacccgttttcattcgcgacaggatcggttatacg

SEQ ID NO: 18387 - RNA, 151 nt, unidentified
  source 1..151: mol_type = other RNA; note = Related to BJHP01000039.1; note = Planctomycetia bacterium
cccaagccttgttggtgagctgctttgacggcggctcaacaacgccacggggataccccgcggttgtttgcttgtgttgatttcgttgccgtaccggcaccgcgagaggagtttttctcgcacgtcggtacgctactggacccgttgagca

SEQ ID NO: 18388 - RNA, 150 nt, unidentified
  source 1..150: mol_type = other RNA; note = Related to VGZH01000005.1; note = Planctomycetes bacterium
cccaagccttgttgctgagctgctttgaccgcggctcaacaacgccccggggataccccgcggtagttcgcttgcgttgatttcgttgccgtagccggcaccgagaagtcatgttcttgccaccggctacgctactggacccgttgagca

SEQ ID NO: 18389 - RNA, 151 nt, unidentified
  source 1..151: mol_type = other RNA; note = Related to JAFEBR010000742.1; note = Planctomycetes bacterium
cacaagccctgttcggcacgctttcgggcgtaaccggacggctgtggggataccccgcagaagaataattgtcagcatttcgaatgtggattcaccgcggcggtgcgactgtgcaccgccgcgtgaatccgccacaggaacgagttgtgcg

SEQ ID NO: 18390 - RNA, 152 nt, unidentified
  source 1..152: mol_type = other RNA; note = Related to JACQFH010000599.1; note = Planctomycetia bacterium
cacaagaccggttcggcacgccttgactggcgttccgaatggctgcggggataccccgcggatgaagcattgtcagcatttcgaacgtggattcgccaacgcggagcgacactgctccgcgtcgggaatccgccacaggaacgagttgtgcg

SEQ ID NO: 18391 - RNA, 144 nt, unidentified
  source 1..144: mol_type = other RNA; note = Related to RPPR01000054.1; note = Planctomycetaceae bacterium
cacaagatacagaccggcgttcatcgcgccgggcgactgcggggataccccgcgggagaactgatgtctgactttcgcggcgcgacttgccgccggtacgaccttgtaccggccggcaagtcggccaccggaacgagttgggcg

SEQ ID NO: 18392 - RNA, 144 nt, unidentified
  source 1..144: mol_type = other RNA; note = Related to DNUF01000128.1; note = Planctomycetaceae bacterium
cacaagctgctgtttggcgcttcccgcgtcaaacgactgcggggttaccccgcgggagagtcattgtctgccattcgtatgggaagcgccgtgcggtacgaccctgcacacgcacgacgcttcgccacaggaacgagttgggcg

SEQ ID NO: 18393 - RNA, 150 nt, Symmachiella macrocystis
  source 1..150: mol_type = other RNA; note = Related to NZ_SJPP01000003.1
cacaagatttgaccgatcctaccttgaccggtatgtcggtctgctgcggggctaccccgcggaagccacattgtttcacattcgatcgtgaatcgtgactcacgtggatcgtcacgtgagtcacgattcgccacaggaagcagttgttcc

SEQ ID NO: 18394 - RNA, 132 nt, unidentified
  source 1..132: mol_type = other RNA; note = Related to JAGQQA010000064.1; note = Planctomycetaceae bacterium
cacaagattcattcctctggaatgactgtggggctaccccacggaagattgattgttctggattcgcgacgtgaatagtcgtctgcggcaggatctcccgcagagactattcggcacaggaaaagttgtgcg

SEQ ID NO: 18395 - RNA, 147 nt, unidentified
  source 1..147: mol_type = other RNA; note = Related to SIAF01000026.1; note = Planctomycetaceae bacterium
cacaagccagtttcgacacgccctgaccggcgtggcgaacgctgcggggttaccccgcggacgtgtgattgccagacattcgatcgtggatattgccgtcgggagacggtcccgacggcaatatccgccacaggaatcagttgtgcg

SEQ ID NO: 18396 - RNA, 152 nt, Gimesia aquarii
  source 1..152: mol_type = other RNA; note = Related to NZ_CP037422.1
cacaagttctgactctaactgaatcctgacggatcacttagagtactgcggggataccccgtgggagaagtattgaccattctacgatatgtgaagtatcgctacgatagactcttatcgtagcaatacttcgctacaggatcggttgtgcg

SEQ ID NO: 18397 - RNA, 152 nt, Gimesia aquarii
  source 1..152: mol_type = other RNA; note = Related to NZ_CP037920.1
cacaagttctgactctaactgaatcctgacggatcacttagagtactgcggggataccccgtgggagaagtattgaccattctacgaaatgtgaagggtcgctacgatagactcttatcgtagcaacccttcgccacaggatcggttgtgcg

SEQ ID NO: 18398 - RNA, 152 nt, Gimesia fumaroli
  source 1..152: mol_type = other RNA; note = Related to NZ_CP037452.1
cacaagttctgactctgattgtatcctgacggatcgctcagagcactacggggataccccgtgggagaagtattgaccattctacgacacgtgaagtatggctacgatagatggttatcgtagcaatacttcgccacaggatcggttgtgcg

SEQ ID NO: 18399 - RNA, 152 nt, Gimesia maris
  source 1..152: mol_type = other RNA; note = Related to NZ_CP036353.1
cacaagttctgactctgactgaatcttgacggatcgctcagagttctgcggggataccccgtgggagaaggattgaccatgcatcgacacttgaagtgtcgctacgatagacgcttatcgtagcaacacttcgtcacaggatcggttgtgcg

SEQ ID NO: 18400 - RNA, 152 nt, Gimesia chilikensis
  source 1..152: mol_type = other RNA; note = Related to NZ_VTSR01000009.1
cacaagctctgactctgaatgaatcctgaccgatttctcagagcactgcggggataccccgcgggagaagaattgaccagactacgacaggtgaagtgtcgcaacgaaagaccattttcgttgcaacacttcgtcacaggatgggttgtgcg

SEQ ID NO: 18401 - RNA, 136 nt, unidentified; identical to SEQ ID NO: 17804
  source 1..136: mol_type = other RNA; note = Related to CP036268.1; note = Planctomycetes bacterium Pan189

SEQ ID NO: 18402 - RNA, 149 nt, Calycomorphotria hydatis
  source 1..149: mol_type = other RNA; note = Related to NZ_CP036316.1
cccaagttcagtcgccccgtctcatacggcgggcagtcgacactacggggttaccccgtggtagaattattgctcacttggcgtcgcgagtgcgtgcccaatcggttgatgaaccgattgagcacgcacggtacaggaagcgttgagcg

SEQ ID NO: 18403 - RNA, 145 nt, unidentified
  source 1..145: mol_type = other RNA; note = Related to JAGQQC010000202.1; note = Planctomycetaceae bacterium
cccaagatttggctcgccatccgcaaggatgccagccgctgtggggataccccacggtcgaagaattgcacgacattcgttcccggaagattgaagttgtatagaagttatacaattaaatcttcgcgacaggatgcgttgagcg

SEQ ID NO: 18404 - RNA, 145 nt, Polystyrenella longa
  source 1..145: mol_type = other RNA; note = Related to NZ_CP036281.1
cccaagcccaggtttgccatccgcaaggatgacagccgctgtggggataccccacggtagaagagttgcttgacactcgttcccggaaggtgttaccgactagaagttagtcggtctacaccttcgcaacaggatccgttgagcg

SEQ ID NO: 18405 - RNA, 141 nt, Planctopirus hydrillae
  source 1..141: mol_type = other RNA; note = Related to LYDR01000158.1
cacaagaagaggccatatcgctgaaaagcctggccggtgcggggttaccccgtgctcgaatgattgctcccatactgaactggaatcctgtctacggtggttccaccgtagacaggattcgaaacaggcattggttgtgcg

SEQ ID NO: 18406 - RNA, 139 nt, unidentified
  source 1..139: mol_type = other RNA; note = Related to JABTUM010000004.1; note = Planctomycetes bacterium
gtcaagcgaacgagcgcaagctcgggccgcggggttaccccgcgggcgaagacacggcttggatccgtcgtatgagctagacgcgcgatgggcgcggacgcgccatcgcgcgctagctccacacaggtgctgttgattt

SEQ ID NO: 18407 - RNA, 139 nt, unidentified
  source 1..139: mol_type = other RNA; note = Related to JACQFI010000030.1; note = Planctomycetes bacterium
gtcaagcgaactcgcgcaagcgagggctgcggggttaccccgcaggcgaactaatggcttgcattcgtcggttgtctgtatcccgcgactcgggcagtgccgagtcgcgggtacagaccacacaggtcaaggttgatac

SEQ ID NO: 18408 - RNA, 137 nt, unidentified
  source 1..137: mol_type = other RNA; note = Related to JACKID010000003.1; note = Planctomycetes bacterium
gatttgactgcgcaggcttcgcgccttcgcgcggcggggttaccccgccggaacgcagtggtttctcatgcattgcccgaccaagccgaggtttctgcgaaacctcggcttggtcggggccgggagctggaagtctc

SEQ ID NO: 18409 - RNA, 123 nt, unidentified
  source 1..123: mol_type = other RNA; note = Related to JAGQRI010000064.1; note = Planctomycetes bacterium
gacttgactgcgaaagcaggggcggggctaccccgtccattcgccaagcttcttcatgcaacgctggggtaacacggtcttctacgaagaccgtgttaccccaggccgggagccggaagtctc

SEQ ID NO: 18410 - RNA, 137 nt, unidentified; identical to SEQ ID NO: 18408
  source 1..137: mol_type = other RNA; note = Related to JACKID010000003.1; note = Planctomycetes bacterium

SEQ ID NO: 18411 - RNA, 134 nt, unidentified
  source 1..134: mol_type = other RNA; note = Related to JAGQRE010000003.1; note = Planctomycetes bacterium
gatttgactgcgctgacttcggtcaacgcgcgaaggggctaccccttcgaaacgcagtggtttctcatgcatcgcacgacctgaccggttcattgcatgaaccggtcaggtcgtggccgggagctggaagtctc

SEQ ID NO: 18412 - RNA, 124 nt, unidentified
  source 1..124: mol_type = other RNA; note = Related to JADLAK010000089.1; note = Planctomycetes bacterium
gatttgccggccgcaaggccgagacggggttaccccgtcatcgcagccagctagaccatgcgacgtctggatcgcgacaactctgcgagttgtctgcgatccaggccgggagcaaggaaatcgg

SEQ ID NO: 18413 - RNA, 232 nt, Pedobacter xixiisoli
  source 1..232: mol_type = other RNA; note = Related to OCMT01000001.1
ctttcggatttaaaaaataccttgctttttctgcataagaaaatgatgatgtttcgtcatcgaagaattgatatttgacacacggcactacctgcaatctttatggggagaacacgtactatacgtacggtttcggttccatactccgcgagtttaaccgtacgtatagtacgtgttctctggagttgattgatatagtcctatgaaaatacgaaggattttaaattctgcc

SEQ ID NO: 18414 - RNA, 232 nt, Pedobacter sp.
  source 1..232: mol_type = other RNA; note = Related to NZ_CP042171.1
ccctcggattaaaaaaataccttgctttttctgaataagaaaatggtgatgtttcgtcatcgatgaactaatatttgacactcggcactacctgcaatctttatggggagaacacgtaccatacgtacggtttcggttccatactccgcgagtttaaccgtacgtatggtacgtgttctctggagttgattgatatagtcctatgaaaatacgaaggattttaaattcgggc

SEQ ID NO: 18415 - RNA, 232 nt, Pedobacter changchengzhani
  source 1..232: mol_type = other RNA; note = Related to NZ_SJCY01000003.1
tggcaattaatttagtaaataccttgcttttctgaataagaaaatgatgatgtttcgtcatcgatgaataatatttgacacacggcactacctgcaatctttatggggagaacacgtactatacgtacggtttcggtaccgtactccaagagtttaaccgtacgtatagtacgtgttctctggagttgattgatatagtcctatgaaaatacgaaggttctaaattaaagcc

SEQ ID NO: 18416 - RNA, 217 nt, Bacteroides sp.
  source 1..217: mol_type = other RNA; note = Related to QVMJ01000008.1
agttcggaaagtaccttgcttttctgaaaagaaaaagatgatgtttcgtcatcggtgaatagatatttgacattcggcactacctccaatctttatggggagatacactactatacgcatggttgctgttctcctctccacgagattaaccatgcgtatagtagtgtatctctggagttgattgatatagtcctgggaaaatacgaagattccgaac

SEQ ID NO: 18417 - RNA, 219 nt, Bacteroides sp.
  source 1..219: mol_type = other RNA; note = Related to JAJQFD010000060.1
cggtttagaaataccttgcttttctgcaaagaaaaagatgatgtttcgtcatcgatgagcaattgtttgacattcggcactacctgcaatctttatggggaggatacctactatacgtatggtttgctgttcttccctccgcgaggtaaaccatacgtatagtaggtatcctctggagttgattgatatagtcccaggaaaatacgaaggttctgaacc

SEQ ID NO: 18418 - RNA, 229 nt, Apibacter raozihei
  source 1..229: mol_type = other RNA; note = Related to NZ_CP034930.1
gttcagggttaaaaaataccttgcttttctgaataagaaaaagatgatgtatcgtcatcggtgagctattgctagacattcggcactacctgcaatctttatggggagagtaactactatacgtatggttacggttctcctctccacgagtttaaccatacgtatagtagttactctctggagttgattgatatagtccttagaaaatacgaaggttttttaacctgaa

SEQ ID NO: 18419 - RNA, 230 nt, Flavobacterium sp.
  source 1..230: mol_type = other RNA; note = Related to PRDM01000004.1
gttttgagtttaagaaataccttgcttttcttgtataaagaaaatgatgatgtttcgtcatcggtgtaaaaatatttgacattcagcactacttctatcttatggatgagaaagtgtactaggcgtacagtttcggttccacctcctcgagattaactgtacgcctagtacactttctctggagttgatagacatagtccttagagaatacgaaggttttaaactttaag

SEQ ID NO: 18420 - RNA, 231 nt, Flavobacterium cheongpyeongense
  source 1..231: mol_type = other RNA; note = Related to NZ_QJHK01000001.1
gttttgagtttaagaaataccttgctttttcttgtataaagaaaatgatgatgtttcgtcatcgatgtaaaattatttcacattcagcactacttctatcttatggatgagaaagggtactatacgtacagtttcggttccacctccttgagattaactgtacgtatagtaccctttctcgggagttgatagacatagtcctcagaaaatacgaaggttttaaacttttaa

SEQ ID NO: 18421 - RNA, 230 nt, Flavobacterium chungangense
  source 1..230: mol_type = other RNA; note = Related to NZ_JASY01000021.1
gttttgagtttaagaaataccttgcttttcttgtataaagaaaatgatgatgtttcgtcatcggcgtaagattatttaacattcagcactacttctatcttatggatgagaaaaggtactatgcgtacagtttcggttccacctcctcgagattaactgtacgcatagtaccttttctcgggagttgatagacatagtccttagaaaatacgaaggttttaaactttaag

SEQ ID NO: 18422 - RNA, 230 nt, Flavobacterium jumunjinense
  source 1..230: mol_type = other RNA; note = Related to NZ_CP091285.1
tgttacaagtttaagaaaaaccttgcttttcttttttaaagaaaaagatgatgtttcgtcatcgaagtacaattatttgacattcagcactacttctatctattggatgagaaagggtactatacgtacagtttcggttccgcctccacgagattaactgtacgtatagtaccctttctctggagttgatagacatagtccttagaaaatacgaaggtttaaactttagc

SEQ ID NO: 18423 - RNA, 202 nt, Dysgonomonas sp.
  source 1..202: mol_type = other RNA; note = Related to DQAM01000521.1
aggtttggaaaataccttgcttttctgaataagaaaaagatgatgtttcgtcatcggcggaaaaatatttgacattcggcactacctgcaatctttattgggagaatagctactatacgcatnnnnnnnnnnnnatgcgtatagtagctattctctggagttgattgatatagtcccaggaaaatacgaaggttcccgaacc

SEQ ID NO: 18424 - RNA, 227 nt, Filimonas sp.
  source 1..227: mol_type = other RNA; note = Related to JAFKHH010000015.1
gtcacggatttggaaagtaccttgcttttctgaataagaaaatgatgatgtatcgtcatcactgattcattataagacattcggcactacctgcaatcttatggggagaacacgcactagtatgtgcggtttcggtacccgctccaagagttcaaccgcacatactagtgcagttctcggagttgattgatatagtccgcggaaaatacgaaggttccgatccaggc

SEQ ID NO: 18425 - RNA, 231 nt, Dysgonomonas sp.
  source 1..231: mol_type = other RNA; note = Related to NZ_OEPV01000013.1
aagtagaggttaagaaaatacttgcttttctgaataagaaaaagatgatgtttcgtcatcaatgagcaatatttatcattcagcactacctgcaatcttttggtggagaattggtactatacgtaccattagcagttctcctctcgttgcgagttaatggtacgtatagtaccattctctggagttgattgttgtagtcccaagaaaatacgaagcatgcttaccctcaca

SEQ ID NO: 18426 - RNA, 211 nt, Chryseobacterium sp.
  source 1..211: mol_type = other RNA; note = Related to JAKVIP010000001.1
tagatagatccttgcttttctttttaagaaatgatgatgtttcgtcatcgatggaaaattgcttagcatactgcactacatactatctttatggtgaaattggtactagtgcgtgccttttcagttcattttccgggaaaataaaggtacgcactagtacccatttctggagttgatagatatagtccttagaagatacgaaggtatatca

SEQ ID NO: 18427 - RNA, 212 nt, Chryseobacterium arachidis
  source 1..212: mol_type = other RNA; note = Related to NZ_FQUT01000024.1
aagatagatccttgcttttctttttaaagaaatgatgatgtttcgtcatcactgtgaaattgcttagcatacgtcactacatactatcttgatggggaaaatggtactagtaggtaccttttcagttcattttccgagaaaataaaggtacccactagtaccattttctggagttgatagatatagtccttagaaaatacgaaggtttatcc

SEQ ID NO: 18428 - RNA, 213 nt, Chryseobacterium gambrini
  source 1..213: mol_type = other RNA; note = Related to NZ_FTOV01000003.1
aagatagatccttgctttcttttttaagaaaagatgatgtttcgtcatcactgtaaaattgcttagcttacggcactacatactatctttaatggggaaaatggtactagtgggtaccttttcagttcattttccgggaaaataaaggtacccactagtaccattttctgggagttgatagatatagtccttggaaaatacgaaggtttatcc

SEQ ID NO: 18429 - RNA, 211 nt, Chryseobacterium luteum
  source 1..211: mol_type = other RNA; note = Related to NZ_JPRO01000015.1
aagatagatccttgcttttctttttaagaaatgatgatgtttcgtcatcgatgtaaaattgcttagcatactgcactacatactatctttaatggtgaaattggtactagtgcgtgccttttcagttcattttccgggaaaataaaggtacgcactagtaccatttctggagttgatagatatagtcctcagaagatacgaaggtatatca

SEQ ID NO: 18430 - RNA, 213 nt, Flavobacterium sp.
  source 1..213: mol_type = other RNA; note = Related to NZ_PJQW01000010.1
agttaaataccttgcttttcttgtaaaagaaaaagatgatgtttcgtcatcaagtagaaattgtatttcacacatcactacatactatctttagggtgagaatacgcactagtagtgcattttcggttccttctccgagagataaaatgcactactagtgcgtattctctggagttgatagatatagtccttagaaaatacgaaggatttaac

SEQ ID NO: 18431 - RNA, 216 nt, Flavobacterium sediminilitoris
  source 1..216: mol_type = other RNA; note = Related to NZ_CP090145.1
aggttaagtaccttgcttttcttttaaaaagaaaaagatgatgtttcgtcatcaagtagaaattgtatttcacacatcactacatactatctttagggtgagaaaacgtactagtagtgcattttcggtgccttctccgagagataaaatgcactactagtacgttttctctggagttgatagatatagtcctaagagaatacgaaggttttaact

SEQ ID NO: 18432 - RNA, 211 nt, unidentified
  source 1..211: mol_type = other RNA; note = Related to JAIBAX010000003.1; note = Chitinophagales bacterium
ttgacattaccttgcttttctgaataagaaatgatgatgtttcgtcatcggtgtaagattgtaaatcatactacactacctactatctttatggtgagaataggtactatacgtgccttttcagaccattttccatgaaattaaaggcacgtatagtacctattctctggagttgatagatgtagtcctaagaagatacgaaggcatgtca

SEQ ID NO: 18433 - RNA, 211 nt, Flavobacterium branchiophilum
  source 1..211: mol_type = other RNA; note = Related to NC_016001.1
aagaataaccttgcttttctatttatagaaatgatgatgtatcgtcatcgttgcatgtttgtaagacatactacactacatactatctttatggtgagaaagagtactatacgtgcattttcaggccattttccgagaaaccaaatgcacgtatagtactctttctctggagttgatagatatagtccttagtaaatacgaaggttacgct

SEQ ID NO: 18434 - RNA, 231 nt, unidentified
  source 1..231: mol_type = other RNA; note = Related to JAJQES010000108.1; note = Tannerellaceae bacterium
gggaggtttggaaataccttgcttctttttcagagaaagatgatgtttcgtcatcgttgtgctaagagttcatcacctgccctgcccgcaatcaccagaccggagcacaatggtttctttagcacgttatacagttcctactccgcgagatcaaacgttctaaagaaaccattgtgctccggagttgattgggatagtcccgggaaaatacgaaggatccaaaccaaagcc

SEQ ID NO: 18435 - RNA, 232 nt, unidentified
  source 1..232: mol_type = other RNA; note = Related to LJIE01000001.1; note = bacterium 336/3
ccatagagatttgaaaataccttgcttcttagcaataagatgaacgatgtttcgtcgttcttgaaaatttgtaacaaatacttcactacatactatctttatggtgactacaccaccctatcgggtgtttcctgtgttaccaccaagtgcttaaacacccgatagggtggtgtagtcttggagttgatagatatagtccagagaaaatacgaagttctttcaaatcattatc

SEQ ID NO: 18436 - RNA, 234 nt, Bernardetia litoralis
  source 1..234: mol_type = other RNA; note = Related to NC_018018.1
aatacagtagttataagtaccttgctttctaagtttattcttagaatgaatgatgtttcgtcattcaagaaattttacctagcatacatcactacatactatctttatgatgactaacaccacctatatgctatttacggtatgagtgcgctgcacttaaatagcatataggtagtgttagtctggagttgatagatatagtcctcagataatacgaagattttataattgtat

SEQ ID NO: 18437 - RNA, 233 nt, Eisenibacter elegans
  source 1..233: mol_type = other RNA; note = Related to NZ_AUMD01000019.1
caagagcgttaaaaataccttgcgttcccgttagagggaaaggatgatgtttcgtcatccgcgcttcattactgcacatgcttcactacgtgctatctttatttggcagatagggggatagtgaagcttttacggacaattttgccgagcaaaataaaagctccactatccccctatctgtggagttgacagacctagtccggagagcatacgaagttatttttatcacgctg

SEQ ID NO: 18438 - RNA, 225 nt, unidentified
  source 1..225: mol_type = other RNA; note = Related to RDZE01000015.1; note = Cytophagales bacterium
taaaaggctgaaaatacttgctttccccttaaaaggaaaaaatgatgtttcgtcattgtcgcaaaaaaacaacacttacatcactacatactatcttaatttagaagaactactactatatgacatttacaggtcatattcccagaatataaatatcatatagtagtggttctttgtgagttgatagatatagttctgagaaaatacgaagtaattttgcctttt

SEQ ID NO: 18439 - RNA, 234 nt, Emticicia sp.
  source 1..234: mol_type = other RNA; note = Related to JAAAKT010000013.1
acaaagtaagagtaaataagaccttgccttccgaaaggaaagaacgatgtatcgtcgttcatgaaatttgactctacatgcatcactaaatacaatcttcactgtgagagctttgtctggtagacaatatttaacagtgaaaactccgagagtttaaaatatcgtctaccagaccgctctcttggagttgattgatttagtcataagaatcttcgaaggttttactctactttg

SEQ ID NO: 18440 - RNA, 227 nt, Fibrella aquatilis
  source 1..227: mol_type = other RNA; note = Related to JAFMYU010000001.1
tcgggttggggttgcaagaccttgcctttccttcgggaaatgaatgatgtttcgtcattctggtaccaagactacacacgcctcactacgtcaatcgttactgtgggggagggggtactagtgcaccttcacagtgcggctcctggggagttgaaggtgcactagtaccccctccccctggagttgattgacatagtcctgagtttgttcgaaggccttcccgcccg

SEQ ID NO: 18441 - RNA, 232 nt, Fibrella aestuarina
  source 1..232: mol_type = other RNA; note = Related to NC_020054.1
gtgcggcgggcgtcaaaaccttgcctttccctcagggaaacgaatgatggttcgtcattccggtatcaagactacacacgcatcactacgtcaatcgttactgtggggagagggtactagtacgaccctcacagtgcgactcctgtggagttgagggtcgtactagtaccctctcccctggagttgattgacatagttctcagtttgttcgaaggctggcccggctgccgcc

SEQ ID NO: 18442 - RNA, 230 nt, Spirosoma oryzae
  source 1..230: mol_type = other RNA; note = Related to NZ_PVTE01000003.1
acggtcaggcacgcaaaagaccttgcgtttccttcgggaaaagaacgatgtttcgtcgttcgtgccaactgacttcacacgcatcattacgtgcaatcgttactgtggggggcttcgtactaggggcaccttttcggtacgactcctgcggactaaaaggtgcccctagtacggccccccgggagtggattgacgtaatcctgagattgttcgaaggccgtgtctgactg

SEQ ID NO: 18443 - RNA, 229 nt, Chitinophaga sp.
  source 1..229: mol_type = other RNA; note = Related to JAGHZS010000007.1
tgtaaagaggaattgattgcacttgcgcccgaaaagggacgaatgatgtttcgtcattcaggtttattgactatacatgcttcactaaatgcaatctttactttgggaggggcctaccatacgcatatttccggtagtagccccgagggctgaaatatacgtatggtaggcccctccctggagttgattgatttagtcaatggttcgcacgaaggcctttcctctttac

SEQ ID NO: 18444 - RNA, 230 nt, Chitinophaga hostae
  source 1..230: mol_type = other RNA; note = Related to NZ_JAGTXB010000010.1
tgtaaagaggaattgattgcacttgcgcccgaaaagggacgaatgatgtttcgtcattcaggtattttgactatacatgcttcactaaatgcaatctttactttgggaggggcctaccatacgcatatttccggtagcagccccgggggctgaaataatgcgtatggtaggcccctccctggagttgattgatttagtcaatggttcgcacgaaggcctttcctctttac

SEQ ID NO: 18445 - RNA, 230 nt, Chitinophaga arvensicola
  source 1..230: mol_type = other RNA; note = Related to NZ_FOJG01000002.1
tgtaaagaggaattgattgcacttgcgcccgaaaagggacgaatgatgtttcgtcattcaggtattctgactatacatgcttcactaaatgcaatctttactttgggaggggcctactatacgcatatttccggtagtagccccgagggctgaaatatgcgtatagtaggcccctccctggagttgattgatttagtcaatggtttgcacgaaggccttttcctctttac

SEQ ID NO: 18446 - RNA, 230 nt, Chitinophaga polysaccharea
  source 1..230: mol_type = other RNA; note = Related to NZ_VIWO01000002.1
tgtaaagaggaattgattgcacttgcgcccgaaaagggacgaatgatgtttcgtcattcaggtattttgactatacatgcttcactaaatgcaatctttactttgggaggggcctaccatacgcatatttccggtagaagccccaggggctgaaatatacgtatggtaggcccctcccttgagttgattgatttagtcaatggcttgcacgaaggcctcttcctctttac

SEQ ID NO: 18447 - RNA, 233 nt, Chitinophaga jiangningensis
  source 1..233: mol_type = other RNA; note = Related to NZ_FRBL01000014.1
tataaagaggaattgattgcacttgcgctccttcatggagatgaatgatgattcgtcattcaggtattttgactatacatgcttcactaaatgcaatctttactttgggaggggcctactatgtagatatttacggtaagagcccctggggcttaaatatccacatagtaggcccctccctggagttgattgatttagtcaatggtttgcacgaagcgccctttcctctttat

SEQ ID NO: 18448 - RNA, 234 nt, Chitinophaga dinghuensis
  source 1..234: mol_type = other RNA; note = Related to NZ_QLMA01000005.1
tataaagaggaattgattgcacttgcgctccttcatggagatgaatgatgtttcgtcattcaggtattctgactatacatgcttcactaaatgcaatctttactttgggaggggcgtactatatcgatatttacggtataagccccttggggcttaaatatcaatatagtacgcccctccctggagttgattgatttagtcaatggtttgcacgaagcgccctttcctctttat

SEQ ID NO: 18449 - RNA, 232 nt, Chitinophaga sp.
  source 1..232: mol_type = other RNA; note = Related to VWWO01000002.1
tataaagaggaattgattgcacttgcgctccttacggagatgaatgatgtttcgtcattcaggtatactgactatacatgcttcactaaatgcaatctttactttgggaggggcgtactagtatgatatttactgtacaagcccctggggctcaaatatcacactagtacgcccctccctggagttgattgatttagtcaatggcttgcacgaagcgcctgttcctctttat

SEQ ID NO: 18450 - RNA, 230 nt, Chitinophaga niastensis
  source 1..230: mol_type = other RNA; note = Related to NZ_PYAW01000007.1
tgtaaagaggaattgattgcacttgcgcccgaaaagggatgaatgatgtttcgtcattcaggtatattgactatacatgcttcactaaatgcaatctttactttgggaggggcgtactatggtgatatttactgtacgcgccccgggggctgaaatatcaccatagtacgcccctccctggagttgattgatttagtcataggtttgcacgaaggccttttcctctttac

SEQ ID NO: 18451 - RNA, 231 nt, Chitinophaga oryzae
  source 1..231: mol_type = other RNA; note = Related to NZ_CP051205.1
tgtaaagaggaattgattgcacttgcgcccgtaaaagggacgaatgatgtttcgtcattcaggaattatgactatacatgcttcactaaatgcaatctttactttgggaggggcgtacctagtgcgaatttacggtacgagccccgggggctgaaattcacactaggtacgcccctccctggagttgattgatttagtcaatggcttgcacgaaggccttttcctctttac

SEQ ID NO: 18452 - RNA, 231 nt, Chitinophaga flava
  source 1..231: mol_type = other RNA; note = Related to NZ_QFFJ01000003.1
tgtaaagaggaattgattgcacttgcgcccgtaaaagggacgaatgatgtttcgtcattcaggtattttgactatacatgcttcactaaatgcaatctttactttgggaggggcgtacctagtgcgaatttacggtactagccccgggggctgaaattcacactaggtacgcccctccctggagttgattgatttagtcaatggcttgcacgaaggcctcttcctctttac

SEQ ID NO: 18453 - RNA, 231 nt, Chitinophaga solisilvae
  source 1..231: mol_type = other RNA; note = Related to NZ_RIAR02000001.1
tgtaaagaggaattgattgcacttgcgcccgtaaaagggacgaatgatgtttcgtcattcaggtattttgactatacatgcttcactaaatgcaatctttactttgggaggggtgtacctagtgcgaattttcggtacgacccccgaggggtgaaattcacactaggtacacccctccctggagttgattgatttagtcaaaggtttgcacgaaggccttttcctctttac

SEQ ID NO: 18454 - RNA, 232 nt, unidentified
  source 1..232: mol_type = other RNA; note = Related to JACMJX010000348.1; note = Chitinophagaceae bacterium
ttgtaaggaggtttgattgcacttgcgcccgtaacagggaagagtgatgtttcgtcactcaggttaaatgactttacatgcttcactaaatgcaatctttactatgggatgggggtacctatgtagatttgacggtactccccccgggggggcaaaatctacataggtacccccatccctggagttgattgatttagtcaaaggtttgcacgaagggccattcctccttaca

SEQ ID NO: 18455 - RNA, 232 nt, Chitinophaga sp.
  source 1..232: mol_type = other RNA; note = Related to NZ_CP077769.1
taaggaggaaaaatgattgcacttgcgcccttttatagggaagagtgatgtttcgtcactcaggtaacatgactatacatgcttcactaaatgcaatctttactttgggaggggcgtacctatgcacaatttacggttcacgcccccggggcgcaaattatgcataggtacgcccctccctggagttgattgatttagtcaatggctagcacgaaggccttttttcctcttt

SEQ ID NO: 18456 - RNA, 232 nt, Chitinophaga rhizophila
  source 1..232: mol_type = other RNA; note = Related to NZ_JAICCF010000004.1
gtaaagaggaaattgattgcacttgcgcctggtttcaggaagagtgatgtttcgtcactcaggtaacatgactttatcatgcttcactaaatgcaatctttactttggacggggcgtacctactagtgatttacggtactagccccgggggctccaaatcaccagtaggtacgccccgtcctggagttgattgatttagtcaatggcttgcacgaaggccgtttcctcttta

SEQ ID NO: 18457 - RNA, 233 nt, Chitinophaga sp.
  source 1..233: mol_type = other RNA; note = Related to NZ_CP048113.1
gtaaagaggaaattgattgcacttgcgcctggtttcaggaagagtgatgtttcgtcactcaggtaacatgacattatcatgcttcactaaatgcaatctttactttgggaggggcctacctagtagtgatttacggtacgagccccaggggctccaaatcaccactaggtaggcccctccctggagttgattgatttagtcaatggcttgcacgaaggccgatttcctcttta

SEQ ID NO: 18458 - RNA, 234 nt, Chitinophaga ginsengisoli
  source 1..234: mol_type = other RNA; note = Related to NZ_PYGK01000009.1
ttgtaaagaggaaagtttgcacttgcgcctggtttcaggaagagtgatgtttcgtcactcaggtaacatgacattatcatgcttcactaaatgcaatctttactttgggcggggcgtacctaccagtaatttacggtacgagccccgggggctccaaattaccggtaggtacgccccgccctggagttgattgatttagtcaatggcttgcacgaaggctatttcctctttaca

SEQ ID NO: 18459 - RNA, 233 nt, Chitinophaga tropicalis
  source 1..233: mol_type = other RNA; note = Related to WRXN01000012.1
tgtaaagaggaaatgattgcacttgcgcccgtaacagggaagagtgatgcttcgtcactcaggtaacatgactatacatgcttcactaaatgcaatctttactttgggcggggcacacctaccagtgatttacggtagaagccccgggggctataaatcaccggtaggtgtgccccgccctggagttgattgatttagtcaaaggcttgcacgaagggccgtttcctctttac

SEQ ID NO: 18460 - RNA, 232 nt, Chitinophaga silvisoli
  source 1..232: mol_type = other RNA; note = Related to NZ_QTJV01000007.1
tataaagaggaaatgattgcacttgcgcccgtaaaagggacgaatgatgtttcgtcattcaggtaacatgactatacatgcttcactaaatgcaatctttactttgggaggggcgtactatagtgcaatttacagtactcgccccaggggccctaaattacactatagtacgcccctccctggagttgattgatttagtcaaaggcttgcacgaaggccatttcctctttat

SEQ ID NO: 18461 - RNA, 225 nt, Emticicia agri
  source 1..225: mol_type = other RNA; note = Related to NZ_SEWF01000012.1
aaagtgagaagtactgaataccttgcattccgaaaggaaagaacgatgtatcgtcgttcatgacacaagacttcacacgcatcactaaatacaatctttactgtgaggggggctactataataccttttacagtaaaagctccgggagcttaaaaggtattatagtagcccccctcttggagttgattgatttagtctggagtaccatcgaaggttttctcactt

SEQ ID NO: 18462 - RNA, 230 nt, Emticicia sp.
  source 1..230: mol_type = other RNA; note = Related to QVMT01000016.1
gcaaagtgagaagactaaagaccttgcattccgaaaggaaagaatgatgtttcgtcgttcatgaaacaagactttacacgcgtcactaaatacaatctttactgtgagggctatgtaccagtatgcattttacagtaaatgctccaggagcacaaaatgcacactggtacatgccctcttggagttgattgatttagtcctgagtatcttcgaaggtttttctcactttg

SEQ ID NO: 18463 - RNA, 231 nt, Arcicella aurantiaca
  source 1..231: mol_type = other RNA; note = Related to NZ_QGGO01000002.1
gcaaagagaaaaacacaaagaccttgcattccgaaaggaaagaacgatgtttcgtcgttcgtgaaacatgactacacaagcatcactaattcaatctttactgtgagggcaagttaccagtacgcacttttacagtaaaatctccgagaaattaaaagtgcgtactggtaacgccctcttggagttgattgatttagtcctgagtatcttcgaaggtgttttttctctttg

SEQ ID NO: 18464 - RNA, 230 nt, Runella zeae
  source 1..230: mol_type = other RNA; note = Related to NZ_AUIF01000010.1
gcaaatcaagaaattcaaaatcttgcattccgaaaggaaagaacgatgtttcgtcgttcgtgaaatatgactttacatgcgtcactaaatacaatctttactgtgagggctgcacccccatagggcttttacagtatggcttccttgaagcaaaagcccctatgggggtgcgccctcttggagttgattgatttagtcctgagtatgatcgaagaaaatttcttgaattt

SEQ ID NO: 18465 - RNA, 231 nt, Niastella sp.
  source 1..231: mol_type = other RNA; note = Related to JAGIBF010000018.1
agagggaaaaagattatgcaccttgcttccgaaaggaaagggcgatgtttcgtcgtccatgcaacatgaactatacatgcatcaccaaatgtaatctttactatggcataccgggtgctatttgcttttagcagtacaggcccgttgtgccctaaaagcaaatagcacccggtatgccttgcgttgattaatctggtcaccggcgtgcacgaaggcagcatgatttccctc

SEQ ID NO: 18466 - RNA, 232 nt, Paraflavitalea devenefica
  source 1..232: mol_type = other RNA; note = Related to NZ_JAARML010000006.1
acagagggaaaaaagatgcaccttgcttccgaaaggaaagggcgatgtttcgtcgtccatgcaacatgaactattcatgcatcaccaaatgtaatctttactatggcataccggctaccagtgcaatttatcagtactggcactgtgtgccttaaattgcactggtagccggtatgcctggcgttgattaatctggtcaccggcgcgcacgaaggcagcatgcttccctctg

SEQ ID NO: 18467 - RNA, 230 nt, Paraflavitalea soli
  source 1..230: mol_type = other RNA; note = Related to NZ_CP032157.1
agagggaaaaaagatatgcaccttgcttccgaaaggaaagggcgatgtttcgtcgtccatgcaacatgaatatttcatgcatcaccaaatataatctttactatggcatacacactaccggtcaactatatcagtgccggcactgtgtgccatatagttcaccggtagtgtgtatgcctggcgttgattaatctggtcaccggcgagcacgaaggcagcattattccctc

SEQ ID NO: 18468 - RNA, 230 nt, Niastella vici
  source 1..230: mol_type = other RNA; note = Related to NZ_LVYD01000013.1
agagggtaaaattacatgcaccttgcttccgaaaggaaagagcgatgtttcgtcgctcatgcaacatgaatatttcatgcatcaccaaatgtaatctttactatggcatataggtaccagtgtgcaattatcaggactggcactatgtgccttaattgcacactggtacccatatgccttgcgttgattaatctggtcactggtgtgcacgaaggcagcatgcttccctc

SEQ ID NO: 18469 - RNA, 231 nt, Niastella populi
  source 1..231: mol_type = other RNA; note = Related to NZ_LWBP01000254.1
gaggggaaataattacatgcaccttgcttccgaaaggaaagagcgatgtttcgtcgctcatgcaacatgaatatttcatgcatcaccaaatgtaatctttactatggcatataggtaccagtgtactattttcagtaccggcactatgtgcctaaatagtacactggtacccatatgccttgcgttgattaatctggtcaccggtgtgcacgaaggcagcatgtttctcct

SEQ ID NO: 18470 - RNA, 233 nt, Terrimonas sp.
  source 1..233: mol_type = other RNA; note = Related to JAKLTR010000008.1
tgacggggttgatgtatgcaccttgcttccgaaaggaaagaacgatgtttcgtcgttcatgcgacatgaatagttcatgcatcaccaaatgtaatctttactgtggcatacgggcctatatgtactggttaacagtacaggcaccgtgtgccaaaccagtacatataggcccgtatgcctggcgttgattaatctggtctcaggcacgcacgaaggaatacataaaccccgtc

SEQ ID NO: 18471 - RNA, 232 nt, Citrobacter freundii
  source 1..232: mol_type = other RNA; note = Related to QFQQ01000068.1
gacaggggtaatgcagcaccttgcttccgaaaggaaagaacgatgtttcgtcgttcatgcaacatgaatagttcatgcatcaccaaatataatctttactgtggcatacgggtactataccgctggttttcagttccaagccccgtgtgccaaaccagcggtatagtacccgtatgcctggcgttgattaatctggtctcgggcacgcacgaaggcagcacattatccccgt

SEQ ID NO: 18472 - RNA, 231 nt, unidentified
  source 1..231: mol_type = other RNA; note = Related to JAFLBL010000017.1; note = Chitinophagales bacterium
agagggtcgtttggcattgcaccttgcttcctgaaaaggaaagaacgatgtttcgtcgttcatgcaacatgactcgttcatgcatcaccaaatgtaatctttactatggcatacacgtaccagtgtacctttcccggtgcaggcacgtggtgccataatggtacactggtacgtgtatgcctggcgttgattaatttggtccgcggcaggcacgaaggcgcagccaccctc

SEQ ID NO: 18473 - RNA, 229 nt, Filimonas lacunae
  source 1..229: mol_type = other RNA; note = Related to AP017422.1
gagatggtaaagtaaaggcaccttgcttccgaaaggaatgagcgatgtttcgtcgttctggttcaatgagtttctcatgcatcaccaaatgtaatctttactatggccggggggtaccgtatcaccattatcagtgatggccccgtgtgccataatagtgatacggtaccccccggcctggcgttgattaatctggtcccgggcgggcacgaaggcagccttaccatct

SEQ ID NO: 18474 - RNA, 231 nt, Filimonas zeae
  source 1..231: mol_type = other RNA; note = Related to NZ_BMIB01000004.1
acagaaagatggtaatgcaccttgcttccgaaaggaaagagcgatgtttcgtcgttcaggtacaatgactttgtcatgcatcaccaaatataatctttactatggcccgggggtactatctcaccattatcggtgtaggccccttgtgccagaatagtgagatagtacccccgggcctggcgttgattaatctggtccccggcgtgcacgaaggcagctgccatctttctg

SEQ ID NO: 18475 - RNA, 205 nt, unidentified
  source 1..205: mol_type = other RNA; note = Related to NZ_VVIP01000043.1; note = Proposed Foetidibacter luteolus
atgcaccttgcttccgaaaggaaagagcgatgtttcgtcgctcatgcaaaatgagtttctcatgcatcaccaaatgtaatctttactatggccacagggtgctatatcactatttacagtgaaggccccgtgtgcctaaataatgatatagcaccctgtggcctggcgttgattaatctggtcccgggcaggcacgaaggcagca

SEQ ID NO: 18476 - RNA, 229 nt, unidentified
  source 1..229: mol_type = other RNA; note = Related to JAHBTJ010000009.1; note = Chitinophagaceae bacterium
acagagagatggcgttgcaccttgcttccgaaaggaaagaacgatgtttcgtcgttcatacagcatgactaatacatgcatcaccaaatgtaatctttactatggcctacacgtaccagtgtaccattttcggtaccggcactgtgtgccataatagtacactggtacgtgtaggccttgcgttgattaatctggtcagggcaggcacgaagggcggcgcctctctctg

SEQ ID NO: 18477 - RNA, 227 nt, Flavihumibacter sp.
  source 1..227: mol_type = other RNA; note = Related to LUKG01000006.1
acagagagctggcgcagcaccttgcttccgaaaggaaagaacgatgtttcgtcgttcatacagcatgaccagtacatgcatcaccaaatgtgatctttactatggcatatatgtacctatgtactattttcagtacaggcactatgtgccataatagtacataggtacatatatgccttgcgttgatcaatctggtctgggcaggcacgaagggccgccgctctctg

SEQ ID NO: 18478 - RNA, 211 nt, Pelagicoccus enzymogenes
  source 1..211: mol_type = other RNA; note = Related to NZ_JACYFG010000060.1
cgaaggcgatcctggctttgcaacccgagcggcgtatcgccgttcatgcacacagcctagcatcgcttcactggaacggtcgtcactgtgcgaacacgcataggtgtgtcgtttacagtgccgaccctgcgggtctaaacagacacacctatgcgtgttcgcttgagttgaccgcaccagtcataagagtacgcgaaagtcaggcgccttc

SEQ ID NO: 18479 - RNA, 222 nt, unidentified
  source 1..222: mol_type = other RNA; note = Related to JAGROY010000010.1; note = Verrucomicrobiae bacterium
cagtggcggggcgttgcaccttgcgatttgggcggcggatcgccgtccatgcccatagactagcaacgcaccactggcccgctcttgactgtgcgaggcatccgcccggtgtgcgcttttcggtgcagatccgggggatcaaaagcgcacaccgggcgggcctcgctggagttgaccgctccagtcctgagacctgcacgaaggcaataccgccccgccact

SEQ ID NO: 18480 - RNA, 221 nt, Flavivirga eckloniae
  source 1..221: mol_type = other RNA; note = Related to NZ_CP025791.1
tggtagtgataagataaaaaccttgcattttgattggtggatcgccaatcttgcacacagataccgaacgcgtcactgactcgaacttaacttgtgaaataggtactagtgtactatttccggttagacttctgcgaagtgaaataatacactagtacctatttcactggagttgttcaattcagtcttgagaatcgtacgaaggcatacaaaatacatct

SEQ ID NO: 18481 - RNA, 222 nt, Algibacter lectus
  source 1..222: mol_type = other RNA; note = Related to SORL01000014.1
tggtagtaataagataaaaaccttgcattttgattggtggatcgccaatcttgcttacagataccgaacgcgtcactgactcgaacttaacttgtgaaataggtaccatagtaccatttccggttagacttctacgaagtgaaatagtactatggtacctatttcactggagttgttcaattcagtcttgagaatcgtacgaagggcattcaaaatacatct

SEQ ID NO: 18482 - RNA, 212 nt, Lacinutrix mariniflava
  source 1..212: mol_type = other RNA; note = Related to NZ_LIQG01000027.1
aagataaaaaccttgcattttgattggtgtatcgccaatcttgcttaaagacaccgaacgcgtcactgactcgaacttaacttgtgaaataggtactagtgtactatttccggttagacttctgcgaagtgaaataatacactagtacctatttcactggagttgttcaattcagtcttgagaatcgtacgaagggaattaaatagacatct

SEQ ID NO: 18483 - RNA, 220 nt, Seonamhaeicola marinus
  source 1..220: mol_type = other RNA; note = Related to NZ_VSDQ01000163.1
cggtagtgataagataaaaaccttgcattttgattggtggatcgccaatcttgcacacagatactgaacgcatcactgactcgaacttaacttgtgaaataggtactatagtactatttccggttagacttctgcgaagtgaaataatactatagtacctatttcactggagttgttcaattcagtcttgagaatcgtacgaagggaacaaaatacatct

SEQ ID NO: 18484 - RNA, 222 nt, Crocinitomix sp.
  source 1..222: mol_type = other RNA; note = Related to WTCE01000070.1
tggcagtaataagacaaaaaccttgcaattcggttggtggatcgccaatctagcatacagacaccgaacgcatcactgacctgaacttaacttatgaaatagacactagggtgctatttccggttatacttctacgaagtgaaatagcaccctagtgtctatttcattggagttgttcaattcagtctttagaaacgtacgaagggaactgaaaatacgtct

SEQ ID NO: 18485 - RNA, 213 nt, unidentified
  source 1..213: mol_type = other RNA; note = Related to NVRM01000058.1; note = Flavobacteriaceae bacterium
taagataaaaaccttgcaacgtgattggtgtatcgccaatcttgcttacagtttacgaatgcatcactgacttgaacttaacttgtgaaaagggtactatagtaccatttccggttatacttctccgaagtgaaatagtactatagtacccttttcactggagttgttaaattcagtctttggaatagtacgaagggaatttacataggtctt

SEQ ID NO: 18486 - RNA, 222 nt, Tenacibaculum dicentrarchi
  source 1..222: mol_type = other RNA; note = Related to NZ_OENB01000038.1
tggtagtaataagataacgaccttgcaatttgattggtgtatcaccaatctagcttacagacaccgaacgcgtcactgactcgaacttaacttgtgaaataggtactatagtgccatttcctgttatacttcttcgaagtgaaatagcactatagtacctatttcactggagttgttcaattcagtctttagaattgtacgaagatatatcttattgctacc

SEQ ID NO: 18487 - RNA, 221 nt, Tenacibaculum ovolyticum
  source 1..221: mol_type = other RNA; note = Related to NZ_AUMF01000009.1
tggtagtaataagataaaaaccttgcaatttgattggtgtatcgccaatctagcttacagacaccgaacgcgtcactgactcgaacttaacttgtgaaattagcactatagcactatttccggttatacttcttcgaagtgaaataatgctatagtgctaatttcactggagttgttcaattcagtctttagagttgtacgaagggaaaaaatatacatct

SEQ ID NO: 18488 - RNA, 221 nt, Winogradskyella forsetii
  source 1..221: mol_type = other RNA; note = Related to NZ_CP053348.1
tggtagcaataagataaaaaccttgcattttgattggtggatcgccaatcttgtttacagacaatgaacgcgtcactgactcgaacttaacttgtgaaataggtaccatagtactgtttccggttagacttctacgaagtgaaacagtactatggtacctatttcactggagttgttcaattcagtctttagagtcgtacgaagggaattaaaatacatct

SEQ ID NO: 18489 - RNA, 215 nt, Cellulophaga baltica
  source 1..215: mol_type = other RNA; note = Related to NZ_CP009976.1
aataagataaaaaccttgcattttgattggtggatcgccaatcttgtttacagacaatgaacgcgtcactgactcgaacttaacttgtgaaataggtactagtgtaccatttccggttagacttctatgaagtgaaatagtacactagtacctatttcactggagttgttcaattcagtctttagagtcgtacgaagggaaaaaatacatcttat

SEQ ID NO: 18490 - RNA, 215 nt, Aquimarina muelleri
  source 1..215: mol_type = other RNA; note = Related to BMWS01000013.1
ataagagagaaaaccttgcattttgattggtggatcgccaatcctgcatacagacactaaacgcgtcactggctcgaacttaacttgtgaaataggtactatagtgccatttccggttagacttctacgaagtgaaatagcactatagtacctatttcactggagttgttcaatccagtctttagaattgtacgaagggaataaaatacatctta

SEQ ID NO: 18491 - RNA, 220 nt, Chryseolinea flava
  source 1..220: mol_type = other RNA; note = Related to NZ_QMFY01000006.1
cggtagcagcaggatattaagacttgcaacccgggtggtggatcaccatccttgtacacagcttgctaacgcgccactggctcgttcttgactgtgcgatcctcgtactagtgtaccattcccggtgtgaaatctgaggaattgaaatagtacactagtacggtctcgcttgagttgaccgttccagtcctcaggatgacgaaggatatccgctgctacc

SEQ ID NO: 18492 - RNA, 217 nt, unidentified
  source 1..217: mol_type = other RNA; note = Related to JAIOAO010000004.1; note = Fulvivirgaceae bacterium QH1ED-6-2
gtagcagcaggatatcaaaaacttgcaatccgggtggtggatcaccatccttgtacacagcttactaacgcgccactggctcgttcctgactgtgcgatcctgcgaccatacgcacattttcggtgtgaaatctgaagaatttaaatgtgcgtatggtcgcgtctcgcttgagttgaccgttccagtcctcagcttgacgaagtatatccgctgcta

SEQ ID NO: 18493 - RNA, 217 nt, Chryseolinea sp.
  source 1..217: mol_type = other RNA; note = Related to JAERRB010000002.1
gtagcagcaggatattaaaaccttgcaacccgggtggtggatcaccatccttgtacacagcttactaacgcgccactggctcgttcttaactgtgcgatcctgcaccagtacgcctatttccggtgtgaaatctggagaatttaaataggcgtactggtgcgtctcgcttgagttgaccgttccagtcctcagcatgacgaaggatatccgctgcta

SEQ ID NO: 18494 - RNA, 220 nt, Azospira oryzae
  source 1..220: mol_type = other RNA; note = Related to QFQN01000037.1
tagcagcagagggtattatgacttgcaacccgggcggtggatcaccgtccttgtacacagcttactaacgcgccactggcccgttcttaactgtgcgatcctgccactaccccgtcattcccggtgcgaattctgggaattggaataacggggtagtggcgtctcgctggagttgaccgatccagtcctccgaaagacgaaggatatcctcgctgctact

SEQ ID NO: 18495 - RNA, 218 nt, Sporocytophaga myxococcoides
  source 1..218: mol_type = other RNA; note = Related to NZ_KE384560.1
gtagtggcagggtattaaaatcttgcaacccgggctgtgtatcacagtccttgtacacagcttactaacgcgccaccggctcgttcttaactgtgcgatcctgccactatatgctcatttccggtgagaattccaggaattgaaataagcatatagtgacgtctcgctggagttgaccaatccggtcctcagaatgacgaagaatatcctgtacacta

SEQ ID NO: 18496 - RNA, 217 nt, unidentified
  source 1..217: mol_type = other RNA; note = Related to JAJTHV010000105.1; note = Flammeovirgaceae bacterium
tagcagacgagggtattaagacttgcaacccgggcggtgtatcaccgtccttgtacacagcttgctaacgcgccactggcccgttcttaactgtgcgatcctgcaacctacacactatttccggtgcgaattccgggaattgaaataatgtgtaggttgcgtctcgctggagttgaccgctccagtcctgagtatgacgaagtgtaccctcgctgct

SEQ ID NO: 18497 - RNA, 215 nt, Ohtaekwangia koreensis
  source 1..215: mol_type = other RNA; note = Related to NZ_FUZU01000002.1
gtagcggaagggtataaaaaccttgcaatccgggcggtgtatcaccgtccctgtacacagcttactaacgcgccactggcccgttcttaactgtgcgatcctgctaccagtacgtcatttccggtgcgaattccgggaattgaaataacgtactggtagcgtctcgcttgagttgaccgatccagtcctcagcatgacgaaggtatcctccgcta

SEQ ID NO: 18498 - RNA, 215 nt, Pedobacter sp.
  source 1..215: mol_type = other RNA; note = Related to NZ_JAFEWE010000006.1
tagtgaggcaggccgaaagaccttgcactccgggcggtggatcaccgtccttgcatacagcttagtaacgcgccaccggcctgttcttaactgtacgatcctggtaccatagtgatatttccggtgcaaatccggaggattgaaatatcactatggtaccgtctcgcttgagttgaccaatccggtcctcagaatgacgaaggtgcctcctcact

SEQ ID NO: 18499 - RNA, 220 nt, unidentified
  source 1..220: mol_type = other RNA; note = Related to JAJNDK010000004.1; note = Bacteroidetes bacterium
ttggaaggcgcaggcaaacatcttgcaacccgaacagtggatcgctgttcatgccaacagattagtaatgcatcactggtctgttctttactgtgcggtactgcatccagtacgccatttccggtgagacttcccggaagtgaaatagcgtactggatgcgtaccgcttgagttgaccaacccagtcctcaaagtgaacgaagaaagccctgcccttcca

SEQ ID NO: 18500 - RNA, 217 nt, unidentified
  source 1..217: mol_type = other RNA; note = Related to JAFDXR010000011.1; note = Bacteroidetes bacterium
tggaagaggcagtattacatcttgcaacccggttcgtgtatcgcgatccatgccaacagctcagtaacgcatcactggcctgttctttactttgcaatactgcacctactgtatcatttccggtgagacttcccggaagtgaaataatacagtaggtgcgtattgcttgagttgaccaatccagtcctcaagtagtacgaagaaaactgcctcttcc

SEQ ID NO: 18501 - RNA, 218 nt, unidentified
  source 1..218: mol_type = other RNA; note = Related to CP004371.1; note = Flammeovirgaceae bacterium 311
aggcagcagcaggagaaaaacttgcaatctgagcggcggatcgccgctccggcatacagcaatgcaacgcgtcactggcgcgttcttaacggtgcaccccatctatatgtatgccatttccggtgccacatcggagatgtgaaatagcatacatatagcggggtgcttgagttgaacactccagtcctgtgagtgtacgaagtagacctgctgctgct

SEQ ID NO: 18502 - RNA, 192 nt, unidentified
  source 1..192: mol_type = other RNA; note = Related to DF820455.1; note = Candidatus Moduliflexus flocculans
gaaacgcgacccgaacgaatatttgccttcaaaaacaccgcttcccagcttcactggcctgttcgcgactgtgcagagctaacgcctatctgcatttccggcgcaacttcccggaagtgaaattgcagataggcgttgctctgcttgagttgaacagtccagtcctgaggatgttcgaaggatttcgcgatt

SEQ ID NO: 18503 - RNA, 221 nt, unidentified
  source 1..221: mol_type = other RNA; note = Related to PDSK01000128.1; note = candidate division KSB3 bacterium
ttagagcggtgggggacattcttgcagatgggcgatggatcatcgtccgagcgcatagactgcccatgcttcactggtccgttcgtaactgtgcggagccttcgcctactgtgtcatttccggtgcgacatcggagatgtgaaataacacagtaggcgagctccgcgtgagttgaacgatccagtcctgagagatgtacgaagttctcctctgccgttcta

SEQ ID NO: 18504 - RNA, 220 nt, Desulfonema ishimotonii
  source 1..220: mol_type = other RNA; note = Related to NZ_BEXT01000001.1
cgacagcggcagggccgtaccttgcattttgggcggcggatcgccgtccgcgcacacagactcgcaacgcaccaccggcccgttcataacggtgcgggacatgcctaccggggcccatttccggtttgacatcggagatgtgaaatagggccccggtaggcgtcccgcttgagttgaacggtccggtcgtcagcctgtacgaaggcgctctgccgctgtc

SEQ ID NO: 18505 - RNA, 222 nt, Enterovibrio calviensis
  source 1..222: mol_type = other RNA; note = Related to NZ_JHZA01000001.1
tggtagcgcgacgttagaaccttgcatcgcgaatggtggatcaccattctggtacaaagactacccacgcgtcactgaggcaatcttaactgggccgtactgtcacctatatcgctattgcggtatgacttcgaagaagtcaatgagcgatataggtaacgtacggcatcgagttgattccctcagtactaagaactcttcgaaggaagttgtcgcgctacc

SEQ ID NO: 18506 - RNA, 222 nt, Enterovibrio sp.; identical to SEQ ID NO: 18505
  source 1..222: mol_type = other RNA; note = Related to NZ_SCHN01000009.1

SEQ ID NO: 18507 - RNA, 222 nt, Photobacterium galatheae
  source 1..222: mol_type = other RNA; note = Related to NZ_JMIB01000006.1
tggtagcgcggcaaaagaaccttgcatcgcgaatggtggatcaccattctggtttaaaggctgcccacgcgtcactggcgcaatcttaactgggccgcacagtcacctatatcgctattgcggtatgacttcgccgaagtcaatcagcgacataggtaacgtgcggcatcgagttgattccgccagtactgagaactcttcgaaggaagtggccgcgctacc

SEQ ID NO: 18508 - RNA, 222 nt, Photobacterium sp.
  source 1..222: mol_type = other RNA; note = Related to NZ_CP073578.1
tggcagcgcggctccggaaccttgcatcgcgaatggtggatcgccattctggtggaaagactacccacgcgtcactggcccaatcttaactgggccgcacagtcacctatatcgctattgcggtttgacttcgcagaagtcaacgagcgacataggtaacgtgcggcatcgagttgattgcaccagtactgagaactcttcgaaggaagcggctgcgctgcc

SEQ ID NO: 18509 - RNA, 224 nt, Photobacterium aphoticum
  source 1..224: mol_type = other RNA; note = Related to BMYC01000011.1
acggtagcgcggctaaagaaccttgcatcgcgaatggtggatcaccattctggtttacaggctacccacgcgtcactggtgaaatcttaactgggccgcacagtcacccatatcgctattgcggtatgacttcaaagaagtcaatgagcgatatgggtaacgtgcggcatcgagttgattaccccagtactcagaactcttcgaaggaagacgccgcgctaccg

SEQ ID NO: 18510 - RNA, 221 nt, Vibrio sp.
  source 1..221: mol_type = other RNA; note = Related to PIZL01000001.1
gcagcgcggcagaagaaccttgcctctcgaatggtggatcaccattcaggtataaagactgcccacgcatcactgatgctatctttactgagccgtacagtcacctataccgctattgcggtgtgacttcacagaagtcaatgagcggtataggtaacgtacggcatcgagttgataacctcagtactaagaactcttcgaaggaatatcttgtcgcgctg

SEQ ID NO: 18511 - RNA, 221 nt, Vibrio nigripulchritudo
  source 1..221: mol_type = other RNA; note = Related to CAOA01000064.1
gcagcgcggcagaagaaccttgcatctcgaatggtggatcgccattcaggtttaaagactgcccacgcatcactgatgctatctttactgagccgtacagtcacctataccgctattgcggtgtgacttcacagaagtcaatgagcggtataggtaacgtacggcatcgagttgataccctcagtactaagaactcttcgaaggaatatcgcgtcgcgctg

SEQ ID NO: 18512 - RNA, 221 nt, Motilimonas cestriensis
  source 1..221: mol_type = other RNA; note = Related to NZ_JAIMJA010000004.1
gcaacgcggttgtagaaccttgcatctcgaatggtgtttcgccattctggcacaaagactacccacgcgtagctaatgcaatcttaactgggccgtacagccccctatatcactattgcagtatggcttcaaagaagccaatgagtgatatagggggcgtacggcatcgagttgattgccttagcactgagaactcttcgaaggaaactttcaccgcgttg

SEQ ID NO: 18513 - RNA, 221 nt, Citrobacter sp.
  source 1..221: mol_type = other RNA; note = Related to NZ_CP057483.1
gcggcgtggcaagcgaaccttgcatcccggatggtggatcgccattcaggttttatgactgcccacgcgtcactgatgccatcttcactgggcagagtgtgagtacctgtcactattgcggtatggtttcgaagaaaccaatgagtgacaggtactccactctgcgtcgagtggacgacctcagcaccaggaactcttcgaaggctttttccgccacgccg

SEQ ID NO: 18514 - RNA, 221 nt, Citrobacter amalonaticus
  source 1..221: mol_type = other RNA; note = Related to NZ_CP011132.1
gcggcgtggcaagcaaaccttgcatcccggatggtggatcgccattcaggttttatgactgcccacgcgtcactgatgtcatcttcactgggcagagtgtgagtacctgtcactattgcagtatggcttcaacgaagccaatgagtgacaggtactccactctgcgtcgagtggataacctcagtaccaggaactcttcgaaggccttatccgccacgccg

SEQ ID NO: 18515 - RNA, 221 nt, Phytobacter massiliensis
  source 1..221: mol_type = other RNA; note = Related to NZ_HE578945.1
gcggcgtggcagtggaaccttgcatcccggatggtggatcgccattcaggttttatgactgcccacgcgtcactgatgccatcttcactgggcagagtgtgagtacctgtcactattgcagtatggcttcaacgaagccaatgagtgacaggtactccactctgcgtcgagtggacgacctcagtaccaggaactcttcgaaggccttatccgccacgccg

SEQ ID NO: 18516 - RNA, 221 nt, Phytobacter diazotrophicus
  source 1..221: mol_type = other RNA; note = Related to NZ_CP051548.1
gcggcgtggcaaggaaaccttgcatcccggatggtggatcgccattcaggttttatgactgcccacgcgtcactgatgccatcttcactgggcagagtgtgagtacctgtcactattgcagtatggcttcaacgaagccaatgagtgacaggtactccactctgcgtcgagtggataacctcagtaccaggaacgcttcgaaggccttattcgccacgccg

SEQ ID NO: 18517 - RNA, 221 nt, Hahella chejuensis
  source 1..221: mol_type = other RNA; note = Related to NC_007645.1
gtagcgcgacaaaactaccttgcaatccgagcggtggatcgccgttcttgcttttagacttatcacgcttcactggccagatctttactgggccgtactgcaccacctatcgctattgcggtttggtttctacgaaaccaatgagcgataggtggtgcgtacggcgtcgagttgatcagtccagttctgagaattctacgaagggaaaccatgtcgcgcta

SEQ ID NO: 18518 - RNA, 221 nt, Agarilytica rhodophyticola
  source 1..221: mol_type = other RNA; note = Related to NZ_CP020038.1
gcagtgcagcaggcctaccttgcaatgcgggcggtggatcgccgtccttgcttatagcctgttcacgcatcactggctcgatctttataatgccgcactgccactactatcgcttttgcggtatggcttctatgaagccaaagagcgatagtagtggcgtgcggcgtcgagttgatcgatccagttctgagaatcctacgaaggaaactcctgctgcactg

SEQ ID NO: 18519 - RNA, 221 nt, Aliikangiella coralliicola
  source 1..221: mol_type = other RNA; note = Related to NZ_ML660163.1
gtaacgctgaccaacgaccttgcaatctgaatggtggatcgccattcttgcttaaagcctgctcacgcgtcactggtccgctctttactgggcgaggaatgcactaccacgtgcgtttctgtttggctcccctggagcaaacagcacgtggtagtgcatcctcgcgtcgagttgagcggcccagtcctgagaatacttcgaagggaaattcggtcgcgtta

SEQ ID NO: 18520 - RNA, 220 nt, unidentified
  source 1..220: mol_type = other RNA; note = Related to JALJPK010000085.1; note = Pseudomonadales bacterium
gtggcgctgatcaacaaccttgcaatccgaatggtggatcgccattcttgtttacagcctactcacgcatcactagtctgatctttactgggcgtaatagtgcccccataaacgtttcagtttggctccgcaggagcaaactgtttatgggggcactattacgcatcgagctgatcagaccagtcccgagaattctacgaagggaaattcgatcgcgtca

SEQ ID NO: 18521 - RNA, 222 nt, Spartinivicinus ruber
  source 1..222: mol_type = other RNA; note = Related to NZ_CP048878.1
gtagtgtagtagagcaactaccttgcgttatgagcggtggatcgccgttcttacttaatgacagcccacgcatcactggcttgctcttaactgggccgaacatacactactatcactattgcggtatggcttccctgaagcgaatgagtgatagtagtgcagttcggcgtcgagttgagcaatccagtcttcaggattctacgaaggctgctcgctgcgcta

SEQ ID NO: 18522 - RNA, 221 nt, Pleionea sediminis
  source 1..221: mol_type = other RNA; note = Related to NZ_SUNB01000001.1
ttggaaagcgtgaagaactttgcatctcggttggtggatcgccaacctggcttcaagacctctcatgcttcactgaccagctctttactgggcggaagatgccctactatcgctattgcagtatgacttcggtgaagtcaatgagcgatagtagggcacttccgcgtcgagttgagcagttcagttctaagaactctacgaaagcactattgcgctttcca

SEQ ID NO: 18523 - RNA, 212 nt, unidentified
  source 1..212: mol_type = other RNA; note = Related to CP059265.1; note = Candidatus Thiothrix singaporensis
aacaagtaaatgaaccttgcattttgaatagtggatcgctattcacgcatagagcctcgcaaagcatcatcagcttgctctttactaaggcggggactgcctactagtgcgaattgcattgggtttctaggaaaccaatatcgcactagtaggcgtccccgcatcgagtgtagcaagctgatcttctgcctgaacgaaggtcatttacctgt

SEQ ID NO: 18524 - RNA, 208 nt, Thiothrix caldifontis
  source 1..208: mol_type = other RNA; note = Related to NZ_FNQP01000009.1
acagtaaatgaacccttgcctattgaacagtggatcgctgttcacgcaaaaagcctgtcaaagcgacatcagcttgctctttactagggcggggactgacgggtagtgcgaattgcattgcgtttctaggaaaccaatatcgcactacccgtcgtccccgcatcgagtgtagcaagctgatcttctggatgaacgaaggtatttactg

SEQ ID NO: 18525 - RNA, 216 nt, Thiothrix sp.
  source 1..216: mol_type = other RNA; note = Related to SSFA01000023.1
ataacacgtaaatgaactttgcaatccgaatagtggatcgctattcctacacacagcctagcaaagcctcattaacttgctctttactaaagctcgggctcgctaccatcacgttttgcatagcgtttctaggaaaccaacaacgtgatggtagcggcccgagcatcgagtgtagcaagctaattttctgaatgaacgactgtcatttacgttata

SEQ ID NO: 18526 - RNA, 219 nt, unidentified
  source 1..219: mol_type = other RNA; note = Related to JAKIVF010000151.1; note = Methylococcaceae bacterium
ttagattaagcaaatgagccttgcaacccgaatagtggatcgctattcatgcatacagcctagcaacgcgtcattaacttgctctttactaaagcgggatcgcactactagtacgcattactatttcgtttcttggaaactaataagcgtactagtagtggatcccgcatcgagtgtagcaagctaattgtttgattgagcgaaggtatttgcttactg

SEQ ID NO: 18527 - RNA, 206 nt, unidentified
  source 1..206: mol_type = other RNA; note = Related to QOAQ01000092.1; note = Aquificaceae bacterium
aagcaaatgagccttgcaacccgaatagtggatcgctattcatgcacatagcctagcaacgcatcattaacttgctctttactaaagcgctatctcgctatctatacgcattacgatttgatttctaggaaattaatagcgtatagatagcggatagcgcatcgagtgtagcaagctaattgtttgattgagcgaaggtatttgct

SEQ ID NO: 18528 - RNA, 219 nt, unidentified
  source 1..219: mol_type = other RNA; note = Related to JADMKE010000002.1; note = Candidatus Sericytochromatia bacterium
tgctagggcacaagccggaaccttgcattatgaatcgtggatcgcgattcttgtccacagtgtggccatgcatcatgtacttgctcttcactatagcggccctgccctaccagagtgcatgtacgggatcctttcagggaaagtacatgcacctggtagggcgttccgcatcgagtgtaacaagcacattgtttgatagaacgaaggattgtgcctggc

SEQ ID NO: 18529 - RNA, 244 nt, Saprospira grandis
  source 1..244: mol_type = other RNA; note = Related to CP002831.1
aggatcaagagaagacaaagtcttgcaaaaagagcgctgtttcggcgttcaagcgatattactcttcactgttcactaaggaagaatctttatgatgcgaaccgtggtaggtgcccctacttgttcccctacgcggtttcgagtcgtagactctgtaggggaacaagtaggggcacctaccacggttcgctggagttgattctcttagttctaagattgtacgaagtaaatcttctctccttct

SEQ ID NO: 18530 - RNA, 238 nt, unidentified
  source 1..238: mol_type = other RNA; note = Related to JABWAJ010000099.1; note = Saprospiraceae bacterium
gcggcggttgctgacaaaaaccttgcaatccggatgctgtttcggcatccatgacacaagaccaggcattcgccggcaaatcgaatcttcatgttgcagccttcggcctacccgggtatctattgcgatcccccggtgttgcgtcgaagacgcggttctcgcaatagatacccgggtaggccgggccgcgggagttgattcgcttgccacgctgatcgtacgaaggtcggcaccgccg

SEQ ID NO: 18531 - RNA, 220 nt, Sulfurovum sp.
  source 1..220: mol_type = other RNA; note = Related to CACVAP010000086.1
ctagaaagtatgagagaaccttgcaatctgcatagtgtatcgctatgtttgtatagagtctagcaaagcgttattaacctattctttactattacaaataacactactatatgcatatttcgtagtggttttgtaaaaacaaatagtgcatatagtagtgctatttgtgtcgagttgaacaggctaatatttgaacgaacgaagactctcatacttttta

SEQ ID NO: 18532 - RNA, 220 nt, Sulfurovum sp.
  source 1..220: mol_type = other RNA; note = Related to CACVAX010000056.1
tagaaacataagagaaccttgcaatttgcatggtgtatcaccatgtctgtttagagtctagcaaagcgttattagcatattctttactattacaaatagggtactagtgtacatatttcgtagtagtcttgtaaagacaaatagtgtacactagtaccccatttgtgtcgagttgaatacactaatatttgagtgaacgaagataaactcttttgtttca

SEQ ID NO: 18533 - RNA, 219 nt, unidentified
  source 1..219: mol_type = other RNA; note = Related to DQOI01000098.1; note = Campylobacterales bacterium
ctagaaagtataagagaaccttgcaatccgtatggtgtatcgccatatatgtatagagtctaacaaagcgttattaacacattctttactattacaaatagggtactagtgtatagattcgaagtggtcttgtaaagtcaaatcgtctacactagtaccccatttgtgtcgagttgaatgagctaatatttgaacgaacgaagactcttatacttttta

SEQ ID NO: 18534 - RNA, 222 nt, Leucothrix arctica
  source 1..222: mol_type = other RNA; note = Related to NZ_QGKL01000042.1
aatgtgatgtgggcaaagaaccttgcaatccgggtggcgtatcgccatccacgcttatagctttgccatgcttcactggtgcattcttaactgggcacccctcactacccatacgcaattacggtataaggtcgttgaccttaatctgcgtatgggtagtgggggtgcttcgagttgaatgccccagtcccgtgtatcgaacgaaggatgcccacatcacat

SEQ ID NO: 18535 - RNA, 223 nt, unidentified
  source 1..223: mol_type = other RNA; note = Related to PDPH01000009.1; note = Proteobacteria bacterium
attgtgatgcgggcactgaaccttgcaaattgtttggtgtatcgccaagcttgcttaaagcaattgtatgcatcactgcctcgctcttgactgggccgaacggtctactgctagtgtcttacgctttaaagccgctggctttaagtacactagcagtagacgttcggcttcgagttgagcgatgcagtcccgagttaatgaacgaaggtcgctcgcatcacag

SEQ ID NO: 18536 - RNA, 230 nt, Ideonella sp.
  source 1..230: mol_type = other RNA; note = Related to PTEU01000001.1
cgagtgcagcgcgtaggctcttgcaatccgggcggtgtttcgccgcccttgttcactgccgttctatgcgccacgggtgccgtcttcactgtgccgggctgccacccatcgcgcaatgtcaatggggctcgcttcgagcacattggcgcgatgggtggcgcccggcgtcgagtggacagcccccgtccctcaagcctttcaggctcttcgacgagaaacgcgctgcactc

SEQ ID NO: 18537 - RNA, 230 nt, Ideonella paludis
  source 1..230: mol_type = other RNA; note = Related to NZ_JAGQDG010000004.1
cgagtgcagtgcgctggctcttgcaacccgggcggtgtttcgccgcccttgttcaccgccgttctatgcgccacgggtgccgtcttcactgtgccgggctgccacccatcgcgcaatgccaatcgggctcgcttcgagcacattggcgcgatgggtggcgcccggcgtcgagtggacagcccccgtccctcaagcctttcaggctcttcgacgagaagcgcactgcactc

SEQ ID NO: 18538 - RNA, 230 nt, unidentified
  source 1..230: mol_type = other RNA; note = Related to NZ_QUSW01000004.1; note = Proposed Albitalea terrae
cgagtgcagcgcgttggctcttgcaatccgggcggtgtttcgccgcccttgttgactgccgttctacgcgccacgggtgccgtcttcactgtgccgggctgccacccatcgcgcaatgccgatgtggctcgcttcgagcgcattggcgcgatgggtggcgcccggcgtcgagtggacagcccccgtccctcaagcctttcaggctcttcgatgagaagcgcgctgcactc

SEQ ID NO: 18539 - RNA, 230 nt, unidentified
  source 1..230: mol_type = other RNA; note = Related to RXJW01000018.1; note = Burkholderiales bacterium
cgggtgcagtgcgtgggctcttgcaatccgggcggtgtttcgccgcccttgtgaactgccgttctacgcaccacgggagctgtcttcactgtgccgggctgccacccgtcgcgccatgccgatggggttcgctccgaacgcatgagcgcgacgggtggcgcccggcgtcgagtggacagctcccgtccttcaagccttgcaggctcttcgatgaggagcgcactgcaccc

SEQ ID NO: 18540 - RNA, 230 nt, Aquabacterium sp.
  source 1..230: mol_type = other RNA; note = Related to SCTF01000217.1
cgagtgcagcgcgcaggctcttgcaacccgggcggtgcttcgccgcccttgctgactgccgttccatgcgccacgggcgccgtcttcactgtgccgcgctgccacccagcgcgcgatgccgatgtgactcccatggagtgcatcggcgcgctgggtggcgcgcggcgtcgagtggacagcgcccgtcctccaagcctttcaggctcttcgacgagaagcgcgctgcactc

SEQ ID NO: 18541 - RNA, 229 nt, Caenimonas sp.
  source 1..229: mol_type = other RNA; note = Related to VOBQ01000016.1
cgagtgcggtgcgcaggctcttgcaacccgggcgatgtttcgtcgcccatgcagcttgcctttccatgcatcacgggtgccgtcttcactgtggcgcacaccctccggtgcgcaatgccggtgtggcttccgaaaagcacattggcgcaccggagagcgtgcgccgtcgagtggacagcccccgtgccacaagccctgcgggctcttcgacgagaagcgcaccgcactc

SEQ ID NO: 18542 - RNA, 230 nt, Rhizobacter gummiphilus
  source 1..230: mol_type = other RNA; note = Related to CP015118.1
cgagtgcggtgcgctggctcttgcaacccggacggtgtttcgccgtccttgcccactgccgttccatgcgccacgggcgccgtcttcactgtgccgcactgacacatggtgcgcaatgccgatgtggctccccgggagcgcattggcgcaccatgtgtcgtgcggcgtcgagtggacgtcccccgtcccgggagccttccaggctcttcgacgagaagcgcgccgcactc

SEQ ID NO: 18543 - RNA, 230 nt, Mitsuaria sp.
  source 1..230: mol_type = other RNA; note = Related to JACHYU010000002.1
cgagtgcagcgcgcaggctcttgcaacccggacggtgtttcgccgtccttgcctcctgccgttccatgcgtcacgggcgccgtcttcactgtgccgcgcagcaccaccgtcgcagattcccatggggcttccctgaagcgaatcgtgcgacggtggtgcgcgcggcgtcgagtggacagcgcccgtccctcaagccttccaggctcttcgacgagaagcgcgctgcactc

SEQ ID NO: 18544 - RNA, 230 nt, Roseateles terrae
  source 1..230: mol_type = other RNA; note = Related to NZ_JACHXO010000001.1
tgagtgcagcgcgcaggctcttgcaatccgggcggtgtttcgccgtctttgctccctgccgttccatgcgtcacgggcgccgtcttcactgtgccacccagccccaccatgggcatctccgatatggctcccctggagcaatatggcccatggtggggcgggtggcgtcgagtggacagcgcccgtccttcaagcctttcaggctcttcgacgagaagcgcgctgcactc

SEQ ID NO: 18545 - RNA, 232 nt, Rhizobacter sp.
  source 1..232: mol_type = other RNA; note = Related to LMDI01000056.1
gtgagtgcagcacgtaggctcttgcaacccgggcggtgtttcgccgtccttgctccctgctgttccacgcgtcacgggcgccgtcttcactgtgccgcgctgacacccagtgcgcaatgccggtatggcttgcctcaagcgcattggcgcactgggtgtcgcgcggcgtcgagtggactgcgcccgtcctcgaagcctttcaggctcttcgatgagacacgtgctgcactca

SEQ ID NO: 18546 - RNA, 230 nt, Ideonella azotifigens
  source 1..230: mol_type = other RNA; note = Related to NZ_JAJNKD010000004.1
cgggtgcagcgcgttggctcttgcaatccgggcgatgtttcgtcgcccttgccaaccgcctgttcatgcgtcacgggtgccgtcttcactgtgccgcgctcgcgccctgtgcgcaattgcggttgggcttgtctcaagccaattggcgcacagggcgcggcgcggcgtcgagtggacagcctccgtcctcggagccccctgggctcttcgatgagaaacgcgctgcaccc

SEQ ID NO: 18547 - RNA, 230 nt, Diaphorobacter sp.
  source 1..230: mol_type = other RNA; note = Related to NZ_CP049905.1
ccggagcaatgagcaggctcttgcaatccgggcggtgtttcgccgcccttgtgaactgccgtttcatgcaccacgggcgccgttttcactgtgccaccccagccacggtagtgcttttcctgagtggcttgccacaagcgaagcagcactaccgtggcggggtggcgtcgagcgaacagctcccgtcccgtgagccctacaggctcttcgacgagatgcacattgctccg

SEQ ID NO: 18548 - RNA, 230 nt, Diaphorobacter sp.
  source 1..230: mol_type = other RNA; note = Related to NZ_CP049910.1
ccggagcaacgcgcaggctcttgcaatccgggcggtgtatcgccgcccttgtgaactgccgtttcatgcaccacgggcgccgttttcactgtgccaccccagcgacggtagtgcatttcctgagtggcttgccacaagcgaaactgcactaccgtcgcggggtggcgtcgagcgaacagctcccgtcccgtgagccttacaggctcttcgacgagatgcacgttgctccg

SEQ ID NO: 18549 - RNA, 219 nt, Diaphorobacter aerolatus
  source 1..219: mol_type = other RNA; note = Related to NZ_CP060783.1
tcaacgcgcaggctcttgcaatccgggtggtgtttcgccgcccatgtgaactgccgtttcatgcatcacgggcgccgttttcactgtgccaccccagccacggtagtgcatttcctgagtggcttgctacaagcgaagctgcactaccgtggcggggtggcgtcgagcgaacagctcccgtccgtgagcctttcaggctcttcgacgagaagcgcgctg

SEQ ID NO: 18550 - RNA, 230 nt, Diaphorobacter sp.
  source 1..230: mol_type = other RNA; note = Related to NZ_CP060714.1
tcggagcaacgcgcaggctcttgcaatccggacggtgcttcgccgtccatgtgaactgccgtttcatgcaccacgggcgccgttttcactgtgccaccccagccatggtgtcgcgcttcctgagtggcttgccacaagcgaagcagcgacaccatggcggggtggcgtcgagcgaacagctcccgtcccgtgagcccgacgggctcttcgacgagaagcgcgttgctccg

SEQ ID NO: 18551 - RNA, 230 nt, Delftia lacustris
  source 1..230: mol_type = other RNA; note = Related to CP065748.1
gcggagcgacgcgcaggctcttgcaacccgggtggtgtttcgccacccttgtgaactgccgtttcatgcaccacgggcgccgttttcactgtgccaccccagcgacggtatgcgttttcctgagtggcttgccacaagcgaaacacgcataccgtcgcggggtggcgtcgagcgaacagctcccgtcccgtgagccctgcgggctcttcgacgagaagcgcgtcgctcca

SEQ ID NO: 18552 - RNA, 230 nt, Delftia lacustris
  source 1..230: mol_type = other RNA; note = Related to NZ_CP069318.1
gcggagcgacgcgcaggctcttgcaacccgggtggtgtttcgccacccttgtgaactgccgtttcatgcaccacgggcgccgttttcactgtgccaccccagcgacggtatgcgttttcctgagtggcttgctacaagcgaaacacgcataccgtcgcggggtggcgtcgagcgaacagctcccgtcccgtgagccctgcgggctcttcgacgagaagcgcgtcgctcca

SEQ ID NO: 18553 - RNA, 230 nt, Delftia tsuruhatensis
  source 1..230: mol_type = other RNA; note = Related to NZ_LR813084.1
gcggagcaacgcgcaggctcttgcaatccgggtggtgtttcgccgcccttgtgaactgccgtttcatgcaccacgggcgccgttttcactgtgccaccccagcgacggtatgcgttttcctgagtggcttgccacaagcgaagcacgcataccgtcgcggggtggcgtcgagcgaacagcgcccgtcccgtgagccttgcaggctcttcgacgagaagcgcgttgctcct

SEQ ID NO: 18554 - RNA, 230 nt, Comamonas composti
  source 1..230: mol_type = other RNA; note = Related to NZ_AUCQ01000016.1
gcggagcaacgcgcaggctcttgcaatccgggtggtgtttcgccacccatgtgaactgccgcttcatgcaccacgggcgccgttttcactgtgccaccccagtggtggtagtgcatttcctgagtggcttgccacaagcgaagctgcactaccaccacggggtggcgtcgagcgaacagctcccgtcccgtgagcctttcaggctcttcgacgagaagtgcgttgctcca

SEQ ID NO: 18555 - RNA, 230 nt, Lampropedia aestuarii
  source 1..230: mol_type = other RNA; note = Related to NZ_SSWX01000040.1
tcggagcaacgcgcaggctcttgcaatccgggcggtgtttcgccgcccatgctctctgccgttctatgcaccacgggcgccgttttcactgtgccaccccagtcatggtgtcgcgcttcctcagtggcttgccacaagcgaagctgcgacaccatgacggggtggcgtcgagcgaacagctcccgtcccgtgagcccgatgggctcttcgacgagaagcgtgttgctccg

SEQ ID NO: 18556 - RNA, 230 nt, Xenophilus sp.
  source 1..230: mol_type = other RNA; note = Related to NZ_CAKAKO010000003.1
gcgatgcagcgcgcaggctcttgccatccgggtggtgtttcgccgcccttgtgaactgccgttccatgcgacacgggtgccgttttcactgtgcggcccctgccacccatgcgccattccggagtggcttgctgcaagcgaatgcgcgcatgggtggcggggccgcgtcgagtgaacagcccccgtcccgagggccctgcgggctcttcgacgagaagcgcgctgcatca

SEQ ID NO: 18557 - RNA, 230 nt, unidentified
  source 1..230: mol_type = other RNA; note = Related to SEAX01000108.1; note = Comamonadaceae bacterium
ccgatgcaacgcgcaggctcttgcaatccgggcggtgcttcgccgcccttgtgaactgccgttccatgcgacacgggtgccgttttcactgtgcggcccctgccacccatgcgccattcctgagtggcttgctgcaagcgaatgcgcgcatgggtggcggggccgcgtcgagtgaacagcccccgtcccgagggccctgcgggctcttcgacgagaagcgcgttgcatca

SEQ ID NO: 18558 - RNA, 230 nt, Comamonas serinivorans
  source 1..230: mol_type = other RNA; note = Related to NZ_CP021455.1
ttcgtgcaacgcgcaggctcttgcaacccggacggtgtttcgccgtccatgacctttgccgtttcatgcgccacgggggaccgttttcactgtgccgaacattggcctgctgtgcacttacgaagaggcttgcgacaagccaattgcacagcaggccaagttcggcgtcgagtgaacagcccccgtcccgtgagccttgcaggctcttcgacgagaagcgcgttgcacga

SEQ ID NO: 18559 - RNA, 223 nt, Massilia armeniaca
  source 1..223: mol_type = other RNA; note = Related to CP028324.1
gcaagcatggcgggatggctcttgcaacccggacggtggatcgccgtcctcgtaccttgccctccccatgcgtcactggcccgctcttcactgtgccggaccagcactggtagcgcgagtcggtgtgaattccctgaattacatcagcgctaccagtgcggtccggcgtcgagttgagcggtccagtcctgccggcccttcgatgacggttccgccatgcttg

SEQ ID NO: 18560 - RNA, 223 nt, Massilia plicata
  source 1..223: mol_type = other RNA; note = Related to NZ_CP038026.1
gcaagcatggcgggacggctcttgcaacccggacggcggatcgccgtcctcgtattcagccctccccatgcgtcactggcccgctcttcactgtgccagaccagcactggtagcgcgagtcggtgtgaattccctgaattacatcagcgctaccagtgcggcctggcgtcgagttgagcggtccagtcctgccggcccttcgatgacggtcccgtcatgcttg

SEQ ID NO: 18561 - RNA, 221 nt, Massilia umbonata
  source 1..221: mol_type = other RNA; note = Related to CP040017.1
caagcatggcgcgatggctcttgcaacccggacggcggatcgccgtcctcgtatcctgctccccccatgcgccactggcccgctcttcactgggccggaccagcgctggcagcgcgagtcggtgtgaatcccatgaattacgccagcgctaccagcgcggtccggcgtcgagttgagcggtccagtcctgccggcccttcgatgacggtcgcgccatgctt

SEQ ID NO: 18562 - RNA, 221 nt, Massilia sp.
  source 1..221: mol_type = other RNA; note = Related to WSES01000020.1
caggtgcggcgggatggctcttgcaaaccggacggtggatcgccgtccacgtattcagccctccccatgcgtcactggcgcgctcttcactgtgccaaactgacgccggtagcgcgagtcggtgtgaattcgccgaattacgtcagcgctaccggcgtcgtttggcgtcgagttgagcgcgccagtcctgccggcccttcgatgacgatcccgccgcacct

SEQ ID NO: 18563 - RNA, 223 nt, Massilia buxea
  source 1..223: mol_type = other RNA; note = Related to BMKG01000047.1
gcaagcatggcgggatggctcttgcaacccggacggcggatcgccgtcctcgtatcctgctctccccatgcgtcactggcccgctcttcactgggccggaccagcccgggtagcgcgagtcggtgtgaattccatgaattacatcagcgctacccgggcggtccggctacgagttgagcggtccagtcctgccggcccttcgatgacggtcccgccatgcttg

SEQ ID NO: 18564 - RNA, 223 nt, Massilia violaceinigra
  source 1..223: mol_type = other RNA; note = Related to NZ_CP024608.1
acaagcacggcgggatggctcttgcaaaccggacggcggatcgccgtccacgttgtcagctcttcccacgcgtcactggcacgctcttcactgtgccgtacctgcaccagtagcgcgacacggtttggcttccctgaagccgatcagcgctactggtgcggtacggcgtcgagtggagcgctccagtcctgcaggcccttcgatgattatcctgccgtgcttg

SEQ ID NO: 18565 - RNA, 223 nt, Pseudoduganella violaceinigra
  source 1..223: mol_type = other RNA; note = Related to NZ_AUDI01000031.1
gcaaacacggcgggatggctcttgcaattcgaacggtggatcgccgttctcgtattcagctcttcccatgcgccactggcacgctcttcacagtgccatacaggccctggtgtggcaagacggtgtgactgcccggcagtccattcgccacaccagggccgtatggcatcgagtggagcgccccagtcttaaaggctcttcgatgacaacccggccgtgtttg

SEQ ID NO: 18566 - RNA, 223 nt, Duganella sp.
  source 1..223: mol_type = other RNA; note = Related to LMFZ01000021.1
gcaaacacggcgggatggctcttgcaacccgaacggcggatcgccgttcacgtattcagctcttcccatgcgccactggcacgctcttcacagtgccatacagacaccagtgcagcaagacggtgtgactgccctgcagtccattcgccgcactggtgtcgtatggcatcgagtggagcgccccagtcttaaaggctcttcgatgacaatcccgccgtgcttg

SEQ ID NO: 18567 - RNA, 223 nt, Massilia guangdongensis
  source 1..223: mol_type = other RNA; note = Related to NZ_WWCJ01000033.1
gcaaacacggcgggatggctcttgcaaaccgaacggcgcatcgccgttcacgtattcagctcttcccatgcgccactggcacgctcttcacagtgccatacaggccccggtgtcgcaagacggtgtgactgcccggcagtccattcgcgacaccggggccgtatggcatcgagtggagcgccccagtcctaaaggctcttcgatgacgatcccgccgtgcttg

SEQ ID NO: 18568 - RNA, 219 nt, Vandammella animalimorsus
  source 1..219: mol_type = other RNA; note = Related to NZ_NSJF01000005.1
cgggcgtacgggcaaggctcttgcatcctgggtggtggatcgccatccgcgttgtttgctctgtcatgcgtcactggcgcactcttcactgtgccgatggcgctacccgccgcttttgccgtttgacttccttgaagtcaaacagcggagggtagcccatcggcgtcgagtggagcgcgcaagtccgaaggcttcttcgatgagaacgcccgtacgccc

SEQ ID NO: 18569 - RNA, 220 nt, Chitinibacter sp.
  source 1..220: mol_type = other RNA; note = Related to NZ_VIRW01000011.1
atggtgtggtggggaggctcttgcaacccggctggtgcatcgccagccttgtcttttgctgttccacgcgtcactggcctgttcttcactgggccggtacgtgctacctgcgacatgacggtgcggcttgtgccaagcccaatgtcgcaggtagcacgtaccggcttcgagtggaccagtccagtcttacaggctcttcgatgagaaccctgccacaccc

SEQ ID NO: 18570 - RNA, 221 nt, Chitinivorax sp.
  source 1..221: mol_type = other RNA; note = Related to NZ_SCOH01000042.1
aatgcgtagcggggaggctcttgcaacccggatggcggatcgccattcatgcttaaagctgtcccacgcgtcactggcccgctcttcactgggccggggcgtgctaccagcgacatgacggttcggcttgttccaagctcgatgtcgccggtagcacgccccggctttcgagtggagcagtccagtctacaaggctcttcgatgagaaccccgctacgcac

SEQ ID NO: 18571 - RNA, 221 nt, Chitinimonas sp.
  source 1..221: mol_type = other RNA; note = Related to JAEUND010000226.1
tcgcgtatggcggggtggctcttgcaacccggacggtggatcgccgtccttgtacctagctgccccacgcgtcactggcctgctcttcactgggccgtaacacacccctagcgccatgacggtgcggcttgtgccaagcccgatggcgctaggggtgcgttacggcttcgagtggaacagtccagtctacaaggctcttcgatgagaaccccgccatcgcg

SEQ ID NO: 18572 - RNA, 221 nt, Uliginosibacterium gangwonense
  source 1..221: mol_type = other RNA; note = Related to NZ_KB892857.1
gcgcagcagcggggtggctcttgcaacccgggtggtggatcgccgcccttgttttcagccctcccacgcgtcactggcccgctcttcactgtgcgggacagcactacctgtcgcaatggcggttgggcttgctacaagcccattagcgacaggtagtgcgtcccgcgtcgagtggagcgctccagtttgacaggctcttcgatgagaaccctgctgctgcg

SEQ ID NO: 18573 - RNA, 219 nt, Undibacterium hunanense
  source 1..219: mol_type = other RNA; note = Related to NZ_JACOGF010000004.1
cgaacaaggcaggaaggctcttgcaatccggatggtgtatcgccatccatgtactttgcttagctatgcatcactgagtttctcttcactgtgccggatacgactgctggcgcaatgacgatgtggattccgtgaaccccattcgcgccagcagtcgtatccggcgtcgagtggagcctctcagtctgaaggctcttcgatgagcttcctgcctttttc

SEQ ID NO: 18574 - RNA, 207 nt, Undibacterium sp.
  source 1..207: mol_type = other RNA; note = Related to JAKZHX010000005.1
aggcaggaaggctcttgcaatccggatggtgtatcgccattcatgtagtttgcttagctatgcatcactgagtttctcttcactgtgccgtatcacactaccggcgcaatgacgatgtggattccgtgaaccccattcgcgccggtagtgcgatacggcgtcgagtggagcctctcagtctgaaggctcttcgatgagcttcctgcc

SEQ ID NO: 18575 - RNA, 218 nt, Undibacterium pigrum
  source 1..218: mol_type = other RNA; note = Related to NZ_QJKB01000012.1
agattttggcaggaaggctcttgcaatccggatggtgtatcgccatccatgttttttgcttagctatgcatcactgagtttctcttcactgtgccggaaggacataccggcgtgatgacgatgtggattccgtgaaccccatcacgccggtatgtccttccggcgtcgagtggagcctctcagtctgaaggctcttcgatgagcttcctgccgctttc

SEQ ID NO: 18576 - RNA, 222 nt, Variovorax guangxiensis
  source 1..222: mol_type = other RNA; note = Related to NZ_RXFT01000001.1
gcgaacggagcgggaaggctcttgcaatccggtcggcgtatcgccgccctcgcatacagcacttcccaagcgtcactggacgtctcttcactgtgccggatggccatggtgacgcgacaacagtgcggcttcctcgaagctcatcggcgtcaccatggccatccggcgtcgagtggagccctccagtcccgaggctcttcgacgagattcccgcttcgttcg

SEQ ID NO: 18577 - RNA, 222 nt, Variovorax sp.
  source 1..222: mol_type = other RNA; note = Related to NZ_CP060295.1
gcgaacggagcgggaaggctcttgcaatccgggtggcgtatcgccaccctcgcacacagcacttcccaagcgtcactggacgtctcttcactgtgccgtaggtgcacggtggcgcgatgacagtgcggcttcctcgaagctcatcggcgccaccgtgcacctacggcgtcgagtggagccctccagtcccgaggctcttcgacgagattcccgccccgttcg

SEQ ID NO: 18578 - RNA, 222 nt, Variovorax paradoxus
  source 1..222: mol_type = other RNA; note = Related to NZ_CP091716.1
gcgaacggagcgggaaggctcttgcaatccggttggcgtatcgccaccctcgcacacagcacttcccaagcgtcactggacgtctcttcactgtgccgtaggtgcacggtggcgcgacaacagtgcggcttcctcgaagctcatcggcgccaccgtgcacctacggcgtcgagtggagccctccagtcccgaggctcttcgacgagattcccgcttcgttcg

SEQ ID NO: 18579 - RNA, 221 nt, Variovorax paradoxus
  source 1..221: mol_type = other RNA; note = Related to CP063166.1
gcgaacggggcgggaaggctcttgcaatccggatggcgcatcgccatcctcgatctcagcacttcccaggcttcactggacatctcttcactgtgccgtacgcgcatggtggcgcgatgacggtgcggcttcttcgaagctcatcgcgccaccatgcgcgtacggcgtcgagtggagctgtccagtcctcaggctcttcgacgagattcccgtcccgttcg

SEQ ID NO: 18580 - RNA, 216 nt, Undibacterium luofuense
  source 1..216: mol_type = other RNA; note = Related to NZ_JAGSPN010000003.1
cagttggcaggaaggctcttgcaacccgaatgatgtttcgtcattcttgcagtatgtcttgttatgcatcactgagccgctcttcactgtgccgtatatgactaccggcgcaatgacgatgcgggttccgtgaacctcattagcgccggtagtcatatacggcgtcgagtggagcttctcagtaccagaggctcttcgatgagcttcctgccctct

SEQ ID NO: 18581 - RNA, 216 nt, Undibacterium squillarum
  source 1..216: mol_type = other RNA; note = Related to NZ_BMYU01000002.1
cagacggcaggaaggctcttgcaacccgaatgatgtttcgtcattcttgcagtatgtcttgttatgcatcactgagccgctcttcactgtgccgtatatgactaccggcgcaatgacgatgcggggtccgtgaccctcattggcgccggtagtcatatacggcgtcgagtggagcttctcagtaccagaggctcttcgatgagcttcctgccctct

SEQ ID NO: 18582 - RNA, 224 nt, Methylobacterium goesingense
  source 1..224: mol_type = other RNA; note = Related to JAFGZG010000009.1
ggggcgtcggccggagcggaccttgcaccctgggcggcgcttcgccgtccctgcaccctgcccggcaaagcgtcactggcccgctcttcactgggccggcactgacctcccccgcgcgctttcggtttgggttccttgaacccaagcgcgcgggggaggtcgtgccggcatcgagtggaccgggccagtcccgagacttgacgaaggctttccggccggcgtcc

SEQ ID NO: 18583 - RNA, 224 nt, Methylobacterium bullatum
  source 1..224: mol_type = other RNA; note = Related to BPQF01000021.1
gggacgtcgggcggagcggaccttgcaacctgggcggcgtttcgccgtccctgcaccctgcccggcaaagcgtcactggcccgctcttcactgggccggcacagacccctaccgcgcgctttctgtttgggttccttgaacccaaacgcgcggtaggggtcgtgccggcatcgagtggaccggaccagtcccgagacttgacgaaggctttccggccggcgtcc

SEQ ID NO: 18584 - RNA, 224 nt, Methylobacterium sp.
  source 1..224: mol_type = other RNA; note = Related to JACHWM010000004.1
ggggagtcggcgggggcggaccttgcatcctgggcggcgtttcgccgtccctgcaccctgcccggcaaagcgtcaccggcccgctcttcactgggccggcactgaccaccccggcgcgttctcgatttgggttccctgaacccaaacgcgccggggtggtcgtgccggcttcgagtggagcgcgccggtcccgagacttgacgaaggcatcccgaccggcgccc

SEQ ID NO: 18585 - RNA, 224 nt, Methylobacterium radiotolerans
  source 1..224: mol_type = other RNA; note = Related to CP001001.1
ggggcgccggccggggcggaccttgcatttcgggcggcgattcgccgtccctgcaccctgcccggcaaagcgtcactggcccgctcttcactgggccggcactgaccaccggtgcgcgttcgcggtttgggttcgctgaacccaaacgcgcaccggtggtcgtgccggcgtcgagtggaccgggccagtcccgagacttgacgaaggcatcccggccgacgtcc

SEQ ID NO: 18586 - RNA, 224 nt, Methylobacterium fujisawaense
  source 1..224: mol_type = other RNA; note = Related to NZ_JACJIM010000008.1
ggggcgtcggccggggcggaccttgcatttcgggcggcgattcgccgtccctgcaccctgcccggcaaagcgtcactggcccgctcttcactgggccggcactgaccaccggtgcgcgttcgcggtttgggttcgctgaacccaaacgcgcaccggtggtcgtgccggcgtcgagtggaccgggccagtcccgagacttgacgaaggcatcctggccgacgtcc

SEQ ID NO: 18587 - RNA, 224 nt, Methylobacterium gossipiicola
  source 1..224: mol_type = other RNA; note = Related to NZ_FOPM01000031.1
ggggcgtcggcagggacggaccttgcattccgggcggcgtttcgccgtccctgcaccctgcccggcgaagcgtcaccggcccactcttcactgggccggcactgaccaccccggcgcgttctcgatttgggttccttgaacccaaacgcgccggggtggtcgtgccggcttcgagtggagtgcgccggtcccgagacttgacgaagacatcccggtcggcgccc

SEQ ID NO: 18588 - RNA, 224 nt, Methylobacterium dankookense
  source 1..224: mol_type = other RNA; note = Related to NZ_CABFVH010000047.1
ggggcgccggccggagcggaccttgcactccgggcggcgtttcgccgtccctgcaccctgcccggcaaagcgtcactggcccgctcttcactgggccggcactgaccacccccgcgcgttcccggtttgggttccctgaacccaaacgcgcgggggtggtcgtgccggcttcgagtggaccggaccagtcccgagacttgacgaaggcattccggccggcgccc

SEQ ID NO: 18589 - RNA, 224 nt, Methylobacterium sp.
  source 1..224: mol_type = other RNA; note = Related to NZ_CAKLBV010000001.1
ggggcgtcgtccggggcggaccttgcatcctgggcggcgtttcgccgtccctgcaccctgcccggcaaagcgtcaccggcccgctcttcactgggccggcactgaccacccggctccgttcgcggtttgggttcgctgaacccaaacggtgccgggtggtcgtgccggcatcgagtggagcgggccggtcccgagacttgacgaaggcatcccggccggcgtcc

SEQ ID NO: 18590 - RNA, 224 nt, Methylorubrum rhodinum
  source 1..224: mol_type = other RNA; note = Related to NZ_JACHOP010000028.1
ggggcgcctgccggggcggaccttgcatcccgggcggcgtttcgccgtccctgcaccctgcccggcaaagcgtcaccggcccgctcttcactgggccggcactgaccacccggcggcgttcgcggtttgggttcgccgaacccaaacgccgccgggtggtcgtgccggcatcgagtggagcgtgccggtcccgagacttgacgaaggcattccggccggcgtcc

SEQ ID NO: 18591 - RNA, 224 nt, Methylobacterium nodulans
  source 1..224: mol_type = other RNA; note = Related to NC_011894.1
ggggcgccggccggcgaggaccttgcaacccgggcggcgtttcgccgtccttgcaccctgcccggcaaagcgtcactggcccgctcttcactggggcggcacaggccaccggtgcgggtttacggtttgggttccctgaacccaaacccgcaccggtggccgtgccgccttcgagtggagcgggccagtcccaggacgagacgaaggcgagccgtccggcgtcc

SEQ ID NO: 18592 - RNA, 224 nt, Methylopila capsulata
  source 1..224: mol_type = other RNA; note = Related to NZ_JAFBCY010000002.1
ggggcgccggacggcgaggaccttgcaacccgggcggcgcttcgccgtccttgcaccttgccccaccacgcgtcactggcccgctcttcactggggcggcgctcgggacctgtgcggtcttacggtttgggttcgttgaacccaagaccgcacaggtcccggcgccgccttcgagtggaccggtccagtcccaggacgagacgaaggcgaaccgtccggcgccc

SEQ ID NO: 18593 - RNA, 224 nt, Methylobacterium brachythecii
  source 1..224: mol_type = other RNA; note = Related to NZ_JACIDN010000003.1
gggacgcaggcaggacaggaccttgcaacccgggcggcgcttcgccgtccctgcttcttgccctgcaatgcgccactggcccggtcttcactgggggaccccagaccaccggtgcggatttacagtttgggttccttgaacccaaatccgcaccggtggtcggggtcccttcgagtggaccgcgccagtcctcagatgagacgaaggcaacccggcctgcgtcc

SEQ ID NO: 18594 - RNA, 224 nt, Methylobacterium variabile
  source 1..224: mol_type = other RNA; note = Related to NZ_LABY01000112.1
gggacgcgggctggacaggaccttgcaacccgggcggcgcttcgccgtccctgcaccctgccctgcaatgcgccactggcccggtcttcactgggggaccccaggcccctggtgcggatgtacggtttgggttccttgaacccaaatccgcaccaggggccggggtcccttcgagtggaccgcgccagtcctcagatgagacgaaggcaatccggccggcgtcc

SEQ ID NO: 18595 - RNA, 224 nt, Enterovirga rhinocerotis
  source 1..224: mol_type = other RNA; note = Related to NZ_SNZR01000011.1
ggggcgccggtcggacaggaccttgcaacctgggcggcgtttcgccgtccctgcaccctgcccggcaaagcgtcactggcccgctcttcactgggggaccccagcccacccgtgcggatttccagtttgggttccttgaacccaaatccgcacgggtgggcggggtcccttcgagtggaccgagccagtcccgagatgagacgaaggcatcccggccggcgccc

SEQ ID NO: 18596 - RNA, 224 nt, Reyranella sp.
  source 1..224: mol_type = other RNA; note = Related to VOHA01000021.1
ggggcgccagccggagcggaccttgcaacccgggcggcgtttcgccgtccttgcaccctgcctggcaaagcgtcactggcccactcttcactgggccggcacagaccaccgtcgcgcttttgcaatatgggtttctaaaacccaaaagcgcgacggtggtcgtgccggcttcgagtggaccgggccagtccttggatccgacgaaggcatcccggccggcgccc

SEQ ID NO: 18597 - RNA, 224 nt, Bradyrhizobium jicamae
  source 1..224: mol_type = other RNA; note = Related to NZ_LLXZ01000195.1
agggcgcaggctggtcaggaccttgcaacccgggcggcgtatcgccgtccttgcaccatgaccatgcatgcgtcactggcccgatcttcactgggccggggcagtccacccatccgcaatcgcagaatgggttccttgaacccaattgcggatgggtggacgccccggcgtcgagtggatcgatccagttcttggatgagacgaaggcaatccggcctgcgccc

SEQ ID NO: 18598 - RNA, 224 nt, Bradyrhizobium tropiciagri
  source 1..224: mol_type = other RNA; note = Related to NZ_LFLZ01000017.1
agggcgcaggccggtcaggaccttgcaacccgggcggcgtatcgccgtccttgcaccatgaccacgcatgcgtcactggcccgatcttcactgggccggggcagtccacccctacgcaatcgcagaatgggttccttgaacccaattgcgtaggggtggacgccccggcgtcgagtggatcgatccagttcttagaagagacgaaggcaatccggcctgcgccc

SEQ ID NO: 18599 - RNA, 224 nt, Labrys sp.
  source 1..224: mol_type = other RNA; note = Related to NZ_CP043489.1
agggcgcgggccggtcaggaccttgcaacccgggcggcgtatcgccgtccttgctacatgaccgtgcacgcatcactggcccaatcttcactgggcggggactgcctaccggtgcgctattgcagattgggttccttgaacccaatagcgcaccggtaggcgtccccgcttcgagtggattgatccagtccttggatgagacgaaggcagcccggcctgcgccc

SEQ ID NO: 18600 - RNA, 222 nt, Catalinimonas alkaloidigena
  source 1..222: mol_type = other RNA; note = Related to NZ_FNFO01000004.1
gcagtgacgcagcctccacaccttgcaacccgggcggtggatcgccgtccatgcacgtagctttcgctcgcatcacaggcacactcttgacggtggctggtacactactacccctgattgcagtgtgatttccgggaactcaatgcgtaggggtagtagtgtaccagccttgagttgagtgctcccgtccccagaatgttcgaaggtaggctcgcgtcactg

SEQ ID NO: 18601 - RNA, 221 nt, unidentified
  source 1..221: mol_type = other RNA; note = Related to CADCTQ010000349.1; note = Cytophagales bacterium
cagtgagttcaccaaccgtaaccttgcaaaccgggcggtgcttcgccgtccttgaatacagactacactcgcgtcacaggcctgctcttcactttagcccgtagagggtagtagagagactgcggtgtgacttcgggaagtcaatgctcctctactaccctctacgggcatcgagttgagcattcccgtcccaagaatgtacgaaggtttggtgactcact

SEQ ID NO: 18602 - RNA, 220 nt, Ferruginibacter sp.
  source 1..220: mol_type = other RNA; note = Related to JACMKY010000311.1
cagtgacctagccaaacagaccttgccaaccgggcggtgcatcgccgtccttgcttacagactaccctcgccccacgggccggctcttgactaagcggtaggcggtaggtgagcctatttcggtgggcattcgtgaatgaaatgatgcccacctaccgcctaccgcctcgagttgagccatcccatcccgagaattgtacgaaggtttggcgaagtcact

SEQ ID NO: 18603 - RNA, 217 nt, unidentified
  source 1..217: mol_type = other RNA; note = Related to JADLDL010000134.1; note = Saprospiraceae bacterium
ttcagttaccgaattcaaaaccttgcaaaccgggcggtgtttcgccgtccatgcacacagacaaatcttgcttcacaggcttgctcttcactatggccggtagatatagtaccggggcttgcggtgtgaattcaggaattcaagactcccggtactatacctaccggcgtcgagttgagcattcctgtcctatgattgtacgaaggtttggtactga

SEQ ID NO: 18604 - RNA, 219 nt, unidentified
  source 1..219: mol_type = other RNA; note = Related to KI932172.1; note = Candidatus Entotheonella factor
cctgcggtgtggtcatagtcttgcctcatgggcggtgtatcgccgtccttgtaacttgacttgacatgcttcactggcccgctctcgactgtgcggagcaatgcctacccaaagccgtcgcggtttggattcggagaatccgacggccctgggttggcgctccgcttgagttgagcgttccagtcctgagtggttttcgaagaccgcaccacgccgtag

SEQ ID NO: 18605 - RNA, 219 nt, unidentified
  source 1..219: mol_type = other RNA; note = Related to PPXO01000342.1; note = Candidatus Entotheonella serta
ccatagtgcggtcgtaagtcatgcctcgtgggcggtgcatcgccgtccttgcaacttgacttcacatgcttcactggcctgctctttactgtgcggagcagtcccaccatggggtgtcgcggtttggattcggagaatccgacaacccccttggtgggcgctccgcttgagttgagcgttccagtcctgagtggttttcgaagaccgcactgcgctatg

SEQ ID NO: 18606 - RNA, 227 nt, Calothrix parasitica
  source 1..227: mol_type = other RNA; note = Related to NZ_AP018227.1
gcgcactaattggttagaaatccttgcaatctggatgatgtatcgtcatccttgtgtatagtccagacacgcatcactagcctgctctttactgtgcggtatctcacctactgggggactttacggtttgacttccgtgaagttaaagttcccccagtaggtggataccgcttgagttgagcagtctagtcctgagatatttacgaaggggataccaataaagtgcg

SEQ ID NO: 18607 - RNA, 221 nt, Calothrix desertica
  source 1..221: mol_type = other RNA; note = Related to NZ_VLKB01000009.1
taagcgcgctggtaaagattccttgcaaattgggcggtgtatcgccgtccgtgcattcagtctatacacacatcactagtctactcttgactgtgcggtcttacgactagtaggcgcattcctgtttgacttatataaagtgaatgggcgcctactagtcgtgaccgcttgagttgagtaacctagtccccagagatttacgaagggaaaccagcgcgcaa

SEQ ID NO: 18608 - RNA, 213 nt, Scytonematopsis contorta
  source 1..213: mol_type = other RNA; note = Related to JAHHIC010000071.1
agttggtaaaaaaatccttgcaaaccggatggtgtatcgccatccatgcgctgagttataacatgcaatcactagtctactcttgactgtgcggttattcagtactacctccgaatttcggattgacttccaagaagtatatgtcggaggtagtactgaaaccgcttgagttgagtagcctagtcctaagggatttacgaaggggataccagc

SEQ ID NO: 18609 - RNA, 260 nt, Calothrix desertica
  source 1..260: mol_type = other RNA; note = Related to NZ_VLKB01000007.1
agctagtcgtaagtattaaccttgcaatccggacgatgtatcatcgtccttgcgctgagtctatacatgcttcactagccagttctttacggcgctccgccacccagtgtcgcggtttggtttctgtaaaaccgacgactctaaatggctaaatcctaacagcacccgagactagcaatcttggtataatgcttgtgggtggctccgctgagtaaaactgtctagtctcgggtgatttacgaaggggtttacaaactagc

SEQ ID NO: 18610 - RNA, 263 nt, Calothrix sp.
  source 1..263: mol_type = other RNA; note = Related to NZ_AP018172.1
tgctagctaaatgtaattaccttgcaacccggacagtgtatcactgtccttgcgctaagttgaaacatgcatcactagcctgctctttacggcgctccgccacccagtgtcgcggtttggtttctgtaaaaccgacgactaactagtagccaacttactcgttagttgccgagatttagatactggttcgataggttggggggtggctccgctgagtagagcagtctagtcctgagaggtttacgaagggtttacaagctaga

SEQ ID NO: 18611 - RNA, 223 nt, Tolypothrix bouteillei
  source 1..223: mol_type = other RNA; note = Related to NZ_JHEG04000001.1
cttaattgttggtaaaaaatccttgcaatctgggcggtggatcgccgtccgtgcgtttagtttagccatacatcactagcccactcttgactgtgcggtcttacggtactaccatggtattccgggttgacatccatgtagtgaatgacccaggtagtaccgtgaccgctgagttgagttgtctagtcctgagggatttacgaagggaaagccaacttattaa

SEQ ID NO: 18612 - RNA, 214 nt, Hassallia byssoidea
  source 1..214: mol_type = other RNA; note = Related to NZ_JTCM02000014.1
atttgttgagttgaaaccttgcaatttgggcgatggttcgtcgtccttgcgtttagcctaatcatacatcactagcctactcttgactgtgcggtcttacggaagctatcgctattccggtttgacttctacgaagtgaatgaagcgatagcttccgtgaccgcttgagttgagtagtctagtccagagggatttacgaagggaaaccaacaaa

SEQ ID NO: 18613 - RNA, 223 nt, Aetokthonos hydrillicola
  source 1..223: mol_type = other RNA; note = Related to NZ_JAAKGC010000016.1
gtttgccgttggtagacaatccttgcaatttgggcggtgcgatcgccgtccttgtgtttagcctatacatgcatcactagcctgctcttaactgtgcggtctttcggcagtaggtcgtattccggtctgacttccgtgaagtgaaagcacgacctactgccgagaccgcttgagttgatcagtctagtccaaaggggtttacgaagggaaagctaacggaaaa

SEQ ID NO: 18614 - RNA, 221 nt, Phormidium ambiguum
  source 1..221: mol_type = other RNA; note = Related to NZ_MRCE01000029.1
ataccagtaggcaccaacaaccttgcattctggacagtggatcgctgtccttgcgcttagtccgcccacgcatcactagcccgctcttgactgtgcctatactcaggtactatcgctattacggtttggtttccgtgaaactaatgagcgatagtacctggtataggctggagttgagcgatctagtcctgagatgtttacgaaggggaaacctactggga

SEQ ID NO: 18615 - RNA, 220 nt, Planktothrix sp.
  source 1..220: mol_type = other RNA; note = Related to JACJPW010000041.1
acgccagaaggcccaacagccttgcaatccgggcagtggatcgctgtccttgcgtttagttcgatcgcgcatcactagcccgctctttactgtgcgtagtgtcaggtagtatcgctattacggtttggtttccgcgaaactaatgagcgatactacctgcactacgcttgagttgatcggtctagtcctgagatgtttacgaaggggcaacctgatggca

SEQ ID NO: 18616 - RNA, 222 nt, Coleofasciculus sp.
  source 1..222: mol_type = other RNA; note = Related to NZ_JACJTV010000005.1
cctaatcagttggtaaacagccttgcaatccggacgatggatcgtcgtccttgcgtttagcctagccatgcaccactagcctgctcttaactgtgcggtcattcagggctacccccttttccggtgggacttccctgaagtgtaagaagggggtagccctgagaccgcttgagttgagcaatctagtcctgagatgtttacgaaggggcaaccaactgacag

SEQ ID NO: 18617 - RNA, 223 nt, unidentified
  source 1..223: mol_type = other RNA; note = Related to DOIX01000137.1; note = Cyanobacteria bacterium UBA11153
cggtattcgttggtaaacagccttgcaattcggatggtggatcgccattcatgcgcatagccaaagcacgcatcactagcctgctctttactgtgcctaccccactactacctggtattccggttggactttcttaaagtgaataaaccaggtagtagtggggtaggctggagttgagcaatctagtccagaggggtttacgaaggggcaaccaacgaatagc

SEQ ID NO: 18618 - RNA, 194 nt, Tychonema bourrellyi
  source 1..194: mol_type = other RNA; note = Related to NZ_NXIB02000033.1
tttgatccttgggggaaagaggtgatttgcgcgcgatcgattagttgagacaagcatcactagccagctcttgactgtgcggggcttcaggtactactgctattgcggtttggcttccgtgaagccaatgagcagtagtacctggccccgctggagttgagcagtctagtcctagggggtttacgaaggggcaa

SEQ ID NO: 18619 - RNA, 221 nt, Oscillatoria sp.
  source 1..221: mol_type = other RNA; note = Related to NZ_KB235948.1
gctaattacgaggtaaacagccttgcaatccgggcggtggatcgccgtccttgcgctcagtccagacacgcatcactagcctgctcttgactgtgcggtcattcgggtactgtcgcaattccagtgtgacttccgcgaagtgaatgagcgacagtacccgagaccgcttgagttgagcagtctagtcctgaggggtttacgaaggggcaaccaaagcttag

SEQ ID NO: 18620 - RNA, 223 nt, Synechocystis sp.
  source 1..223: mol_type = other RNA; note = Related to NZ_ALVU02000001.1
taattttagttggtaacagccttgcaatccggatggtggatcgccatccttgcgtttagttcaagcacgcatcactagctcgatcttgactgtacggtcattcgccctagtacgccctacccggtgggacttccatgaagtgtaaaaggcgtactagggcgagaccgcttgagttgatcgatctagtcctgagaggtttacgaaggggcaaacaactgataat

SEQ ID NO: 18621 - RNA, 222 nt, Moorena bouillonii
  source 1..222: mol_type = other RNA; note = Related to NZ_MKZS01000001.1
ttccatcagttggtaaacagccttgcaatctgggcggtggatcgccgtccctgcgataagttcaaccacgcatcactagcctgctcgtgactgtgcgggctatcgggtgctatcgctattacggtttcgttttcctaaaactaattagcgatagcacccgagcccgcttgagttgagcagtctagtccgagggagtttacgaaggggtaaccaacggagtgg

SEQ ID NO: 18622 - RNA, 224 nt, unidentified
  source 1..224: mol_type = other RNA; note = Related to JAEUQL010000156.1; note = Blastocatellia bacterium
ttggagagtttgacataagccttgcaatccgggcggtggatcgccgtccatgttttcagtctaagcacgcatcactggtcagctcttcactatgcgggacaatgtctctggtgtagatattccggtgtcgttttcgtaaaccgaatagtctacaccagagacgtcccgcttgagttgagcatgcccagtcctcttgtcttttcgaaggggttgtcaaaactcca

SEQ ID NO: 18623 - RNA, 223 nt, unidentified
  source 1..223: mol_type = other RNA; note = Related to JACMLN010000050.1; note = Anaerolineae bacterium
gcaacgaaagggtgccatgaccttgcaacccggatggtggatcgccatccttgcgctgagtccaagccatgcatcactggttcgctcttgacgttgcggcctaagcgggtagtagtgctattccggtggggcaagcgccttgcgaatgagcactactacccgcagtccgcttgagttgagcaacccagtcctgagttgtttacgaaggaacactctttcgaag

SEQ ID NO: 18624 - RNA, 222 nt, Pseudanabaena sp.
  source 1..222: mol_type = other RNA; note = Related to NZ_ALWB01000094.1
gcagtcataagggcaaacaaccttgcaatccgaatggtggatcgccattcttgcatttagtctaagcgcgcatcactggcttgctcttaactgtgcgtctctcgctactagtgtgttattacggtttggcttccgaaaagctaacgaacacactagtagcggagccgctggagttgagcaatccagtcctgagaggtttacgaaggagtaacctgttgactg

SEQ ID NO: 18625 - RNA, 220 nt, Leptolyngbya sp.
  source 1..220: mol_type = other RNA; note = Related to MQTZ01000030.1
gtagaggcggaacgtcaaaccttgcaatccggatggtggatcgccatccttgtggttagtctaaacgcgcatcactggcccgctcttaactgtgcgtctctccgggtactatcgctgttacggtgtcgtttccgcgaagctaacgagcgatagtacccgggagccgcttgagttgagcgatccagttccagggggtttacgaaggaaggttccgccagtg

SEQ ID NO: 18626 - RNA, 223 nt, Pseudanabaena sp.
  source 1..223: mol_type = other RNA; note = Related to NZ_KB235911.1
agcgatcgcggggaaaacgaccttgcaatccgggtggtggatcgccatccatgtacttagtctaaacgcgcatcactggctcgctcttgactgtgcgttactcggagtacccatgctattacggtgtagtttccgtgaaactaacgagcacgggtactccggtaccgcttgagttgagcgatccagttctgagaggtttacgaaggggataacccgcgatcgc

SEQ ID NO: 18627 - RNA, 221 nt, Calothrix sp.
  source 1..221: mol_type = other RNA; note = Related to JAAUPE010000002.1
gttacgtgacaaggaaataccgcttgcaaaccggatgatggttcgtcatccatgcacacagtccagtcacacatcactggctcgctcttaactatgcgggtcttcgggtactagttggtattacggtgtgaattccgtaaattcaatgaccaactagtacccggacccgctcgagttgaccgttccagtcctgagaggcttacgaagaggctcccacgtaa

SEQ ID NO: 18628 - RNA, 214 nt, Chamaesiphon minutus
  source 1..214: mol_type = other RNA; note = Related to NC_019697.1
actgtgcggcgcataccacttgcaatccggatgatggatcgtcatccttgcgtttagtctagccacacatcactagcgcgctcttaactgtgccgatatcacctaatacctgctattgcagtgcagactccatgagtccaatgagcaggtattaggtgtatcggctggcgttgagcgagctagtctcgggggtttacgaagaggagccgcacag

SEQ ID NO: 18629 - RNA, 220 nt, unidentified
  source 1..220: mol_type = other RNA; note = Related to JAAUOP010000014.1; note = Synechococcales cyanobacterium CRU_2_2
ctgaatctgttcaaaaaccccttgcaacccgaatggtggatcgccattcatgcagttagtctagccgcgcatcactggcttgctcttaactatgcgggtcttcggggtaccgtcgctattccggtgtggattccacgaatcgaatgagcgacggtaccccggacccgctcgagttgagcaatccagtcctgagaggtttccgaagcggtgaacagattcg

SEQ ID NO: 18630 - RNA, 221 nt, unidentified
  source 1..221: mol_type = other RNA; note = Related to JADEXQ010000025.1; note = filamentous cyanobacterium LEGE 11480
actattccatccatgagtccccttgcaatccgggtggtggatcgccatccatgcagttagtctagccgcgcaccactggcttgctcttaactatgcgggtcttcgccctactgtcgctattccggtgcagattccgtgaatcgaatgagcgacagtagggcggacccgctcgagttgagcaatccagtcctgagaggttcccgaagaggcggatggaaaaa

SEQ ID NO: 18631 - RNA, 223 nt, Acaryochloris marina
  source 1..223: mol_type = other RNA; note = Related to NC_009925.1
tcggtcagtttaggtttaccccttgcaacccgaatggtgcatcgccattcatgtgattagtctaaacgcgcatcactggcttgctctttactgtgcggggcttcgccctaccatcgctgttacggtttagtttccatgaaactaacgagcgatggtagggcggccccgctcgagttgagcaatccagtccgaagaggtttacgaagaggcgctgaactgaccg

SEQ ID NO: 18632 - RNA, 222 nt, unidentified
  source 1..222: mol_type = other RNA; note = Related to JADJPF010000004.1; note = Blastocatellia bacterium
gtgcaaaagtaaagaacttaccttgcaacccgaatggtggatcgccattcttgtactcagtctagtcacgcttcactagtctgctctttacttttgccggtgctaaccaccggcgggtattccggtttgtgtttcgtaaagtgaataacccgccggtggttgcaccggcatcgagttgagcaagcctagtctttagaactttacgaaggttttgcttttgca

SEQ ID NO: 18633 - RNA, 224 nt, unidentified
  source 1..224: mol_type = other RNA; note = Related to JACQZQ010000027.1; note = Acidobacteria bacterium
tggctaaaatgaaggcttttccttgcaatctggaaggtggatcgctttccttgtcggtagttctgtcatgcttcactagtctgctcttcactattgcccgagctaaggccaggcgcggatttcggtgaggattttataaatctaaatccgcgcctggccttgctcgggcatcgagttgagcaagcctagtccttagaacttttcgaaggtcactcattttagcc

SEQ ID NO: 18634 - RNA, 222 nt, unidentified
  source 1..222: mol_type = other RNA; note = Related to JAIBAN010000080.1; note = Blastocatellia bacterium
ctcctggaccctgaaaaaacccttgcaatccgggcggtggatcgccgcccttgcacatagcctgagcacgcgtcaccggcctgctcgtcactttgcttcacaggacctggtatcgaaattccggtgtggctttcgacaaccaaatgttcaataccaggtcccgtgaagctttagttgagcaagtccggtcctgagagttttcgaaggtatccggttacaggc

SEQ ID NO: 18635 - RNA, 223 nt, unidentified
  source 1..223: mol_type = other RNA; note = Related to JACQXX010000070.1; note = Acidobacteria bacterium
ccaagaaccaaccagattttccttgcaacccggacggtggatcgccgtccttgcgcgcagtttgaaccagcatcactggtctgctcttcactttgcaccctaatgtgctaatagcccaatcccggtttggatgtcccacatcaaatgtgggctattagcacatgggtgcttgagttgagcaagcccagtcctgagaggttttcgaaggaaactggaatttttc

SEQ ID NO: 18636 - RNA, 222 nt, unidentified
  source 1..222: mol_type = other RNA; note = Related to JAFDVL010000054.1; note = Acidobacteria bacterium
cggtcaagcgtgaccaccagccttgcaaaccggacggtggatcgccgtccttgcgctcagttgatgcacgcatcactggcctgctcttgactatgcaagactgcactagctattgctatttcggtgtgtttttcgccaaaagaatgagcaatagctagtgcgtcttgctcgagttgagcaatccagtcctgagagattaacgaaggagtgtcgcggttgact

SEQ ID NO: 18637 - RNA, 219 nt, unidentified
  source 1..219: mol_type = other RNA; note = Related to JAFAZX010000026.1; note = Acidobacteria bacterium
cagggcacgcacgcgggccttgcaacccggacggtggatcgccgtccatgcgcaaagctagggcacgcgtcactggcccgctcttaactgtgcgtagcacgcctgctagcggtattccggattggcttccatgaagcgaatgaccgctagcaggcgtgctacgctcgagttgagcgacccagtcctcaggagttttcgaaggggacgcgggcgcgccct

SEQ ID NO: 18638 - RNA, 222 nt, unidentified
  source 1..222: mol_type = other RNA; note = Related to JABFSD010000364.1; note = Acidobacteria bacterium
gcggccagccactacagaccttgcaacccggtcggtggatcgccgcccatgtgtttagctttgtcacgcttcactggctcgctcttaactgtgcgggtctgcctaccctcacgctattgcggtttgtattccgcgaacaaaatgagcgcgagggtaggcgccccgctggagttgagcgatccagtcctaagaccttttcgaaggaaacaacgtggctggccg

SEQ ID NO: 18639 - RNA, 217 nt, unidentified
  source 1..217: mol_type = other RNA; note = Related to JAFDVJ010000081.1; note = Acidobacteria bacterium
tcgaaaaaacgctctgggacttgcaaaccggacggtgcgatcgccgtccctgccgcttgactgaacacgcttcaccggcttgttcttaacttcggcgaaattccactcctgtcgctgtttcggtcggtattccgcgaataaaactagcgacaggagtagaatttcgcttgagttgaacaatccggtccttcgatttcacgaagacgcgcgtttttcg

SEQ ID NO: 18640 - RNA, 222 nt, unidentified
  source 1..222: mol_type = other RNA; note = Related to JAIBCC010000010.1; note = Pyrinomonadaceae bacterium
tttcggcgtttgccgagacatcttgcaaccggagcgatgtttcgtcgttcaagcgcacagattaactacgcatcacgggcttgttctttactgtgcgagtcaatgtcctagtagtgcaatttcggtttgaaatccgagatttaaatttgcactactaggacagactcgctggagttgaacaatcacgtcctttgtttattacgaagatcagcaaacgtcgaa

SEQ ID NO: 18641 - RNA, 220 nt, Acanthopleuribacter pedis
  source 1..220: mol_type = other RNA; note = Related to NZ_JAFREP010000006.1
acgacggtgacgatccgtcttgcaatctggatggcggatcgccatccgtgcttgttggtttgtcacgcttcaccgactcgatcttcactgtgcggaattcacgctatgttcgccaggccggtacgggttccctgaacctcctggtcgaacatagcgcgattccgcgtcgagttgatcgattcggtctcgggaattcatcgaagatggatcgtcgccgtcg

SEQ ID NO: 18642 - RNA, 218 nt, unidentified
  source 1..218: mol_type = other RNA; note = Related to NZ_CP071793.1; note = Proposed Sulfidibacter corallicola
cggcggtgattgtcggctttgcaacccgggtggcgtttcgccatccatgcaacctgatctgtcacgcatcaccggctcgatcttcactgtgcggaactcgctatgtcagtgccaggtcggtttggattccctgaaccacctggtcaccgacatagcggttccgcgtcgagttgatcgatccggtctcgagattctctcgaaggtcgacagtcgccgcc

SEQ ID NO: 18643 - RNA, 221 nt, unidentified
  source 1..221: mol_type = other RNA; note = Related to JAGNHB010000094.1; note = Acidobacteria bacterium
gcgatggtggctcttttcccttgcaacccgggcggtggatcgccgtccatgtccgcagctgaagcacgcgtcactggccagctcttcactttgcgggtctcgccaccggtgggcaattacggtgtgaattccgtgaatttaattcgcccaccggtggcggacccgcttcgagttgatcagtccagtcccgagacgtttccgaaggaacccgactgccatcg

SEQ ID NO: 18644 - RNA, 218 nt, unidentified; identical to SEQ ID NO: 18642
  source 1..218: mol_type = other RNA; note = Related to NZ_CP071793.1; note = Proposed Sulfidibacter corallicola

SEQ ID NO: 18645 - RNA, 225 nt, unidentified
  source 1..225: mol_type = other RNA; note = Related to JACKEM010000004.1; note = Deltaproteobacteria bacterium
gggagacgcttcgagaaggaccttgcattaggggcggtggatcgccgtccaagcgaaatggcttctcttgcgtcactggtctgctcgtgactgtcgggattgcccaccggtccgttggtcccaagggggatcggcgtcgatcgaacgcaacgcaccggtgggcatcccttgtgagttgagcagtccagtcaggtgttaggacgaaggggtcttcgaagcgtctcc

SEQ ID NO: 18646 - RNA, 221 nt, unidentified
  source 1..221: mol_type = other RNA; note = Related to JAGQSB010000027.1; note = Acidobacteria bacterium
agcagcagtgggttccttccttgcaacccgggcggtggatcgccgtccatgtcaacaggcttcccatgcatcacgagcccgctctttactgtgcgaattacgcccaccacgctccattacggtatgaattccgtgaatttaatgaagcgtggtgggcaaattcgcgtcgagttgagcggtctcgtcccaagatgttttcgaagattcgaatccactgctgc

SEQ ID NO: 18647 - RNA, 222 nt, unidentified
  source 1..222: mol_type = other RNA; note = Related to JAHBVW010000058.1; note = Deltaproteobacteria bacterium
gcgtgacgggtggccttggaccttgcaacccgggcggcggatcgccgtccatgcggtcagctcgtgcgtgcctcactggctcgctcaagactgtgcgcacgtcgactcccccaaaggattccggtggggatttcgagaaatcgaatgccctcgggggagtcgacgtgcgctcgagcaaagcaatccagtcccgagagtagacgaaggtagccacccgtcacg

SEQ ID NO: 18648 - RNA, 220 nt, unidentified
  source 1..220: mol_type = other RNA; note = Related to JABFXX010000347.1; note = Kofleriaceae bacterium
gcgtggcgcgtggtcctagaccttgcaatcgggcggcggatcgccgtccttgcgttgatcccgcgcatacctcactggctcactcaatactgtgtgtccgcagtgcaccccaggagattccgagggggtttcgtgaaagcgaatgcacccggggtgcaccgcggccactcgagccgagcgatccagtcccaggcgtagacgaaggtaactacgcgccacg

SEQ ID NO: 18649 - RNA, 226 nt, unidentified
  source 1..226: mol_type = other RNA; note = Related to JAGPDK010000426.1; note = Kofleriaceae bacterium
gcgtggcgggtgagatacgaaccttgcaatctggttggcggatcgccaaccttgcggtcacgtaccccatccatcactggctcgctcaatactgtgtgccgacggcatggtgcagtcgattctcaagcggattcccgatgggaatcgaatgcaaccgcaccataccgtcggcactcgagccgagacgatccagtcccaggagtgaacgaaggtctcacccgccacg

SEQ ID NO: 18650 - RNA, 221 nt, unidentified
  source 1..221: mol_type = other RNA; note = Related to JABFRG010000606.1; note = Polyangiaceae bacterium
agagcgcgcgcggggcctgatcttgcaaaccgggcggcggatcgccgtccttgcagcctggccttccatgcttcactggctcgctcttgactgtgcgattaagacccaccacatcgaattccgggttcaatccggcagattcaatgtcgacgtggtgggtctcatcgcttgagttgagacgatccagtcccgagatctacgaagtgcctccgcgcgcgctc

SEQ ID NO: 18651 - RNA, 193 nt, unidentified
  source 1..193: mol_type = other RNA; note = Related to JAGQIK010000716.1; note = Myxococcales bacterium
catcctttgctttatgggcggcggatcgccgtcctagcgaaatggttgtccacgtttcactagctcgctcttaacgatgccggggctgccctgctgtcgctatcgcgagtgtcttccgcgaagacgatgagccgacagcagggcgccccggcttgagttgagcgatctagtcctgggagtctctcgaagggat

SEQ ID NO: 18652 - RNA, 209 nt, unidentified
  source 1..209: mol_type = other RNA; note = Related to JAFCZD010000018.1; note = Deltaproteobacteria bacterium
aagtcagacgactttgcattctgggcggtggatcgccgtctttgccgagtggtttttcatgcttcactagctcgctcttaactgtgccggtactgccctggtagtgctatcggcggttggattccgtgaatccgatgagccactaccagggcgtaccggctggagttgagacgatctagtcccgggcgtctttcgaaggaactctgacc

SEQ ID NO: 18653 - RNA, 223 nt, unidentified
  source 1..223: mol_type = other RNA; note = Related to JAEUJZ010000010.1; note = Myxococcales bacterium
gggatgagcgagagactcttcttgcaaccgggcggtggatcgccgtccatgcagcatggctgttcatgcatcactggtctgctctttactgtgcggccctgggcctgatgtccaaattgcaggttggttttcggaaaaccaatgttcgacatcaggcccgtgccgctcgagttgagacagcccagtcccaagaggtcttcgaagtcagctctcttgctctccc

SEQ ID NO: 18654 - RNA, 220 nt, Thiorhodococcus sp.
  source 1..220: mol_type = other RNA; note = Related to AFWT01000002.1
tcggaagcggactcatcctttgcattctgggcggcggatcgccgtctttgccaagtggttattcatgcgtcactagctcgctcttaactgtggcgatactgccccctaggtgcctttgccggttgaatcccttggattcaaaggtgcacctagggggcgtatcgcctggagttgagacgatctagtcctgagtcattcgaaaggactccgcgccgctccg

SEQ ID NO: 18655 - RNA, 220 nt, unidentified
  source 1..220: mol_type = other RNA; note = Related to JAEUKG010000966.1; note = Myxococcales bacterium
gagacggctggcggggcgatcttgcaacctgggcggtggatcgccgtccatgcaacctggcccgtcatgcatcactggcccgatctttactgtgcgggacacagggtgctgtagggattccggtgggaatcctgggagattggatgccccacagcaccccggtcccgcttgagttgatcgagccagtccctcgtgggttcgaagaccccgtcggccgtct

SEQ ID NO: 18656 - RNA, 222 nt, unidentified
  source 1..222: mol_type = other RNA; note = Related to JAESTW010000014.1; note = Kofleriaceae bacterium
gcagcgatatagatccataaaccttgcagtatgggcggcggatcgccgtccttgtgaattggcctgtcatgcatcactagctcgctcgtgactttgccggggaagcctccctcgacgttcttcggtgtgatttgccgagaatataagaacgtcgagggaggctccccggccggagttgagacgatctagtcctgagagttgtacgaaggtatctaatcgctg

SEQ ID NO: 18657 - RNA, 222 nt, Cystobacter gracilis
  source 1..222: mol_type = other RNA; note = Related to NZ_JAHXBG010000009.1
cggcggtcagagggcggtaccttgcaacccggacggcgtttcgccgtccttgcctgatggcctgtgatgcatcactggcccgctcttgactgtgccgtacctccctaccccaggcgtatggcggtttggattccgtaaatccatagcgcccggggtagggggtacggcttgagtcgagacgagccagtcctgagagcagtacgaaggtgctctcggaccgcc

SEQ ID NO: 18658 - RNA, 222 nt, unidentified
  source 1..222: mol_type = other RNA; note = Related to JAFGNZ010000091.1; note = Myxococcaceae bacterium
cggcggtcagagggcagtaccttgcaacccgggcggcgtttcgccgtccttgcctcctggcctgtgatgcttcactggcccgctcttgactgtgccgtgtctccctaccacgtgcgtatggcggtgtggattccgtaaatccatatcgcacgtggtaggggccacggcttgagtagagacgagccagtcctgagagctgtacgaaggtgctcttggaccgcc

SEQ ID NO: 18659 - RNA, 221 nt, Archangium sp.
  source 1..221: mol_type = other RNA; note = Related to NZ_JADWYI010000001.1
cggcggtcagggggctgttccttgcaatccgggcggtgtttcgccgtccatgcctcatggcctgtcatgcatcactggcccgctcttcactgtgcgggtcctccctccctgtagcggcggcggtgtcaaccgcgtcggttccgcgcgccacagggagggggacccgctggagttgagacggtccagtcccgagagcggttcgaaggtgctcccggaccgcc

SEQ ID NO: 18660 - RNA, 220 nt, unidentified
  source 1..220: mol_type = other RNA; note = Related to JADIZX010000005.1; note = Myxococcales bacterium
cggcggtcttcggggtgacatcttgcaacacgggcggcgtttcgccgtccatgcgacctggccctccatgcgtcactggcccgctctcgactgtgcggacgacgcctagctggtgctgttccggggtcaatcccgagaattcaacgagcaccagctaggcgcgtccgcttgagttgagcgagccagtcccgagacatcttcgaaggtccccgaagccgcc

SEQ ID NO: 18661 - RNA, 220 nt, unidentified
  source 1..220: mol_type = other RNA; note = Related to JADJQX010000001.1; note = Myxococcales bacterium
cggcggacttcggggtcacatcttgcaaaccgggcggtgtttcgccgtccatgcaacctggccctccatgcgtcactggcccgctctcgactgtgcgtccgatgcctagctagtgctgttccgggttcaatcccgcatattcaacgagcaccagctaggcacggccgcttgagttgagcgagccagtcccgagacatcttcgaaggcccccgaatccgcc

SEQ ID NO: 18662 - RNA, 221 nt, unidentified
  source 1..221: mol_type = other RNA; note = Related to JAIOQA010000029.1; note = Deltaproteobacteria bacterium
cgcgacgacggagcactggaccttgcaaccgggcggcgtttcgccgtccatgcgacctggcccctcatgcgtcactggctcgctcgtgactgtgcgagggctgccaccacgcgtcgataccgagtggcatctcgcagatgtcatgcgacgcgtggtggcgccctcgctcgagttgagacgatccagtcctgagagctgtacgaaggttgctccgtcgttgc

SEQ ID NO: 18663 - RNA, 222 nt, unidentified
  source 1..222: mol_type = other RNA; note = Related to JAGPCY010000008.1; note = Kofleriaceae bacterium
gcggagcgatcaggcggcacatcttgcaacccggacggtggatcgccgtccctgcaacctggcctggcacgcatcactggcccgttcttgactgtgcgacgtctgccacccctgcgggataccggtgtcaatcccgcgtattccatacccgcaggggtggcgacgtcgcttgagttgaccgagccagtcggaagagtgttcgaaggaccgcctgacgctccg

SEQ ID NO: 18664 - RNA, 223 nt, Nannocystis exedens
  source 1..223: mol_type = other RNA; note = Related to NZ_NETK01000001.1
tgacaacggcgaaggccgagcctagcaacccgggcggcggatcgccgtccttgcgaaatgctcgttcacgcttcactggcccgctcttgactgtgcggcccatcgggtagctgtcgctattccggtgtgacttccatgaagcgactgagcgacagctacccggggccgcttgagttgagcggtccagtcctttgagccttcgtagcgggtcttcgccgttgtc

SEQ ID NO: 18665 - RNA, 221 nt, unidentified
  source 1..221: mol_type = other RNA; note = Related to JAEUJW010000075.1; note = Myxococcales bacterium
cgacaacggcaagtgcatagccttgcaacccgggcggcggatcgccgtccatgcaaacagctcatacacgcttcactggcccgctcttgactgtgcggtacatcgggtagcagcggctattccggtgtggcttccgagaagcgaatgagccgctgctacccggtaccgcttgagttgagcggtccagtcctgagagccttcgaagggcactcgccgttgtc

SEQ ID NO: 18666 - RNA, 220 nt, Nannocystis sp.
  source 1..220: mol_type = other RNA; note = Related to JADKFZ010000012.1
cgacaacgacgagggcaagccttgcaacccgggcggcggatcgccgtccttgttccatgctcatccacgcttcactggcccgctcttgactgtgcggtacatcgggtagcagcggctattccggtgtggcttccgagaagcgaatgagccgctgctacccggtaccgctggagttgagcggtccagtcctgagagccttcgaagggccctcgtcgttgtc

SEQ ID NO: 18667 - RNA, 219 nt, unidentified
  source 1..219: mol_type = other RNA; note = Related to JAGQIT010000589.1; note = Myxococcales bacterium
gcggcgcgaggtgaccaggccttgcaacccgggcggcggatcgccgtccatgccgcatgacaatgcacgcatcactggtctgctcgttactttgcggtacctcggggtagtgtcgctattcctgtagggattccgtgaaccgaatgagcgacactaccccgggtaccgcttgagttgatcagcccagtcctggggagccttcgaaggcgccgagcgtcg

SEQ ID NO: 18668 - RNA, 222 nt, unidentified
  source 1..222: mol_type = other RNA; note = Related to JACKDU010000005.1; note = Myxococcales bacterium
cagcggcgcgaggagccaggccttgcaacctgggcggcggatcgccgtccttgccgcatgacaatgcacgcatcactggtctgctcgttactgtgcggtacctcggggtagtgtcgctattccggtgagggtcccgcgaaccgaatgagcgacactaccccgggtaccgcttgagttgaccagcccagtcccggggagccttcgaaggcgccagacgccgct

SEQ ID NO: 18669 - RNA, 225 nt, unidentified
  source 1..225: mol_type = other RNA; note = Related to JACKDW010000029.1; note = Myxococcales bacterium
cagcggcggtggtgaaccagccttgcaaaccgggcggcggatcgccgtccatgcacacagctcagccacgcgtcactggtccgctctttactgtgcggtaccatcgggtagtcgtgcttttccggtgcgacttcggagaagtgaataagcacgactacccgacgtaccgcttgagttgagcggcccagtcctgaggagccttcgaagggactcgcccccgtcgcc

SEQ ID NO: 18670 - RNA, 219 nt, unidentified
  source 1..219: mol_type = other RNA; note = Related to JAGQQQ010000127.1; note = Planctomycetaceae bacterium
cggaagcacgagtgagccttgcaacttgggcggcgtatcgccgttcgtgtcaattggttgaaactgcgtcactggtccgctcttgactgtgccattctcgcaccagtacggcgtttgcggtgcgaatccgttggattcaaactgccgtactggtgcggaatggcttgagttgagcggcccagtcctcagagcctttcgaagggaaactcgcctgctccg

SEQ ID NO: 18671 - RNA, 220 nt, unidentified
  source 1..220: mol_type = other RNA; note = Related to DLZC01000224.1; note = Planctomycetaceae bacterium
tggcggtcctgcagtgagccttgcaacccgggcggtggatcgccgtccatgcaacctgctttgaaccgcgtcactggtccgctcgtgactttgccggacatcacacctgtacgtcgattccggtgtggattccgcgaatcgaattcaacgtacaggtgtggcccggcttgagttgagcgacccagtcctgagagcctttcgaagggaatctgcagccgcc

SEQ ID NO: 18672 - RNA, 221 nt, Polystyrenella longa
  source 1..221: mol_type = other RNA; note = Related to NZ_CP036281.1
agcagccggtgaagtgagccttgcaacccgaatggtggatcgccattcatgtgaattgataggaaccgcatcactggcccactcgtgactgtgcgggctgtcacctagtaacggtaattgcagtgtgaatcccctggattcaattgaccgttactaggtggcccgcttgagttgagcggtccagtcctgagagcctttcgaagggaagtcttaccggctgt

SEQ ID NO: 18673 - RNA, 219 nt, unidentified
  source 1..219: mol_type = other RNA; note = Related to JABMRB010000852.1; note = Candidatus Nealsonbacteria bacterium
ggaccggtcgagcgagccttgcaatccgggtggcggatcgccatccatgtgaaacgaattggaccgcatcactggcccgctcttgactgtgcggactacgccaccggtgcccgtttgctgtgcgagtcccaaggactcaaacagggcaccggtggcagtccgcttgagttgagacggtccagtcctcagagcctttcgaagggaaatgctcgtccggcc

SEQ ID NO: 18674 - RNA, 223 nt, Lignipirellula cremea
  source 1..223: mol_type = other RNA; note = Related to NZ_CP036433.1
agacggcggttgcgagcgagccttgcaacccgggcggcgtatcgccgtccttgccaaatgatagagaccgcatcactggcccgctcttgactgtgcggaacatgcccacgggacgccatttacggtgcgtgccccgtgggcataaatagcgtcccgtgggcgttccgcttgagttgagacggtccagtcctgagagcctttcgaagggagctcctccgccgtc

SEQ ID NO: 18675 - RNA, 226 nt, unidentified
  source 1..226: mol_type = other RNA; note = Related to JAHQVJ010000249.1; note = Myxococcales bacterium
ctgaggtgggcagcgcacgccttgcaacccgggcggtgtcatcgccgtccatgcgcacagctgtgctctgcctcactggtccgatctccactatgcgctatagggccccctgccggcggcagcgatgggcctcgtgctcgaggtgccgcccggtagggggcccaatagcgcgtcgagttgatcgacccagtctccagcgagagcgaagacctcgctgcccatctca

SEQ ID NO: 18676 - RNA, 229 nt, unidentified
  source 1..229: mol_type = other RNA; note = Related to JAHJCH010000337.1; note = Myxococcota bacterium
agggtgcggtcgaggcaaagcttgcagtggggcggtggatcgccgtccatgcaccttgaccgagcatgcgtcactggcctgctcttcactggtaggccccagtatgggctagtccgtatttggcggtgcgttgtctgccgacaacaattacggactagcccataggggccttaattgagttgagacagtccagtctccgacgagaacttcgaagttttcggccgcgccc

SEQ ID NO: 18677 - RNA, 219 nt, Persicimonas caeni
  source 1..219: mol_type = other RNA; note = Related to NZ_CP042468.1
cagcagtgagagggcagcaccttgcatcatgagcggcgattcgccgttcgcgatcaaagccctacaacgcgtcactgactcgctcgtgactgtgcggcctaaccctccccgggcgccgctccagtccggcttcggtgaagcgagcggcgcccggggagggtggccgcttgagttgagcgatccagtcaacagactggcacgaaggtccctctcactgct

SEQ ID NO: 18678 - RNA, 219 nt, Acanthopleuribacter pedis
  source 1..219: mol_type = other RNA; note = Related to NZ_JAFREP010000009.1
cccccacgggtcgtgctcaccttgcaacccgaatggtgtttcgccattcatgcgctcagacccaccatgcatgcccggtcggcgcgtggcgcgacgtcgcctgtaccgcccgcgacattacggttcgaattccgagaacctaatgcgcgcggacggcgggtcgacgtcggcgccgtaccgcccggcaggatctagttcacgaagggacgacccatgggg

SEQ ID NO: 18679 - RNA, 232 nt, unidentified
  source 1..232: mol_type = other RNA; note = Related to SECR01000885.1; note = Myxococcales bacterium
ctgcgcagcgacggtcacgtcttgcaacccgggcggtgcatcgccgcccttgcatcctggtttcccgtgcatccctggcccgctcttcactgtgctaggccgctagccgtccgcgagatgcggtggccacagcgtgctacgcacaccgtgatctgcgcggacggctagcggcctagcttgagttgatcgagccaggcccgagcgtcttacgaagcacgaccgtcgctgcgca

SEQ ID NO: 18680 - RNA, 216 nt, unidentified
  source 1..216: mol_type = other RNA; note = Related to JAGQVA010000789.1; note = Bacteroidetes bacterium
atggaaagagggtgcaaagatcttgcatttggaatggtggatcgccattcgcgcatgctggtttggacagcgtcacaggccagttctttactttgcaaatagacaccctatacgtcacttccggtgtgacttccaggaagtgaagtaacgtatagggtatcatttgcttgagttgaactctcctgaaataaggaagtacgaagtaaccctcttcca

SEQ ID NO: 18681 - RNA, 219 nt, Actibacterium sp.
  source 1..219: mol_type = other RNA; note = Related to JAFEUL010000003.1
agaaggcgcatggcggctttgcttattggatggtgtttcgccatcccggcctattgactgctcatgcatcgctggcgcgctctctatttgggcaccccagccccaccatgcgctttgctgtatgacttccgtgaagtcaaagacgcatggtggggcggggtgccctcgagttgagcgttccagcgctgggacttgttcgaaagtccggcatgcgctttt

SEQ ID NO: 18682 - RNA, 222 nt, Ruegeria sp.
  source 1..222: mol_type = other RNA; note = Related to JAKRGB010000012.1
aaagcaagaggctgggagccttgcatcttgggcggtgtttcgccgtccgcgccaaccgactgtacatgcgtcgctggctcaatcttcacaacgcgaccccagccacccctatgcgcttgccgtttgagttcgcagaactcaaggcgcataggggtggcggggtcgctgggagttgatcgatccagccctgagagctgttcgaaggcaccagtcctcttgctt

SEQ ID NO: 18683 - RNA, 247 nt, unidentified
  source 1..247: mol_type = other RNA; note = Related to PBMT01000060.1; note = Proteobacteria bacterium
atggcttgcaacccgagcggtgtttcgccgttcttgcacactgttctttcatagaaactggaaacgactctatatagagcctcttgcagcgctgtgcagggcgggggccggcatctatcaatcggtatagcaattttccttcgaaacgaaggtagaccgatcaatagatgccggcccccgccctgcacagcgctgcaagaggctgatcgagttgtcgcctccagtgacaaagcttgacgaagccaca

SEQ ID NO: 18684 - RNA, 235 nt, Aureivirga marina
  source 1..235: mol_type = other RNA; note = Related to NZ_JADPIB010000005.1
agagattttgttagcataaatactatggtgtttcgccatggttggagtaaagttctaattacatcactacacgtcaatgacattcagcgtgactcttaggtactataacgtactattgtaccttgtaatgctgagattcattgacattccttaaggtacaatagtacgttatagtacccccgtcacgcctacagtgattgaaggtagtacttggaaagattttgtaacaaaattc

SEQ ID NO: 18685 - RNA, 253 nt, Rhodocytophaga sp.
  source 1..253: mol_type = other RNA; note = Related to NZ_CP048222.1
ttgttgaaaatataagtttttgttagcataaatgctgcggtgtttcgccgtggttgtagttaagctattcatacttcattacacattcatgccattcagcgtgctcctctacccatgggtagtaattcgttagaaaatcgctgaataagcagtggctcaattggtctagactaattactacccatgggtagctccacccgcttacagtaatgaaagataatcctgtgcagagttagtaacaaaaatttcaaca

SEQ ID NO: 18686 - RNA, 242 nt, unidentified
  source 1..242: mol_type = other RNA; note = Related to JABHVB010000067.1; note = Rhodospirillaceae bacterium
ttgcggcgcaggtttgttcctagcaaaaatgccgcggcgtttcgccgtggttgtagtaaagccggtgatacgtcatcggataccaatgtcactcagcccacgtagcgggaacgggcccttcccgcatcacgctgaggcgacttcaaggaagtccatgatgtgggacgagccctttcccgctacgtgggcctacagcgatcggcaccgatcgttgagagatggtaggagcaacctgcgccgcg

SEQ ID NO: 18687 - RNA, 229 nt, unidentified
  source 1..229: mol_type = other RNA; note = Related to VGQQ01000059.1; note = Cyanobacteria bacterium K_DeepCast_35m_m1_288
aggttcaggctcctcctagcaataacgccccggtgcttcgccggggcagcgttcacgcctctcatccaccatcggctgccgatgtcactcagcggccccggccttcccggccgggaacgcttcgctgagccgactgcaggcagtcacaacgcgttcccggccgggaaggccggggccgcctacagcgatcgacaccgatctcagctggatagtaggaagagcctgcacc

SEQ ID NO: 18688 - RNA, 230 nt, unidentified
  source 1..230: mol_type = other RNA; note = Related to JABMNF010000410.1
tgagtgtatggtcttcctagcaattcgcctcggtgcttcgccgaggtagcgttcacgtctctcatccaccatcggctgccgatgtcattcagcggcaacgggccaaaatgcccggagcgcttcgctgaatcgactgcaagcagtcacttttgcgctccgggcgttttggcccgccgccgcctacagcgatcgtcaccgatctcagctggatagtaggaagatctgcgctc

SEQ ID NO: 18689 - RNA, 225 nt, Prochlorococcus marinus
  source 1..225: mol_type = other RNA; note = Related to AE017126.1
aggcaggctgttctagcaattaaaccttggcgtttcgccaaggcagtagttaagctacaaaaccatcatcggctgacgatgtctctcagcatctagctgcttaggccggcctaaacctttctctgaaacgactctacgagtccttcaaagtttaggccggcctaagccgctagacgcctacagtgatcgacaccgatcatagatagggcagtagaacagcctcca

SEQ ID NO: 18690 - RNA, 239 nt, Abditibacterium utsteinense
  source 1..239: mol_type = other RNA; note = Related to NZ_NIGF01000009.1
ccaatgcccgatgcgtggtgccagccttttatctgcgatgtttcgtcgcggtggccgtcaagctctcatcacatcaccggcacgccgtcgcgttttcgcgtcagtgcgtagtagtgcggttcctgtctcggcgctgagagagacaagctcaccggccaggaaccgcactactacgcactgacgctacagtggacggcgccggtcgcttcgctgttaagtggcatttcgcgcgggcattg

SEQ ID NO: 18691 - RNA, 233 nt, unidentified
  source 1..233: mol_type = other RNA; note = Related to AP024152.1; note = Abditibacteriota bacterium
cagccaatgccgaaaggcggccagcatctttgcgatgtttcgtcgcggaagcgttcacgccacctttccatcaccggagcgccgtcgtgttttcgcgctaggcgcgtactagtgcgggagaccgagtcgcggattggggcaagcccaccacgatctcccgcactagtacgcgcctagcgctacagtggacggagccggtcaagtctgtaaagtggccgctttgggcgttggct

SEQ ID NO: 18692 - RNA, 235 nt, unidentified
  source 1..235: mol_type = other RNA; note = Related to JAFAZH010000051.1; note = Abitibacteriaceae bacterium
accttgaggcagctcatttccggcaatttgtccccggcgtttcgccgtggccgtcgtatcgctcgtcatccttcacgggccgccagtgtgatttcacccgctgcgcaccggtaggttgcttgatttcccgctgaagcagcgtagctcaggccatcaagcaacctaccggtgcgcagcgggttacagtgactggcgcccgtcccctctgtttagcggcaatgtagatgcttcaagg

SEQ ID NO: 18693 - RNA, 201 nt, unidentified
  source 1..201: mol_type = other RNA; note = Related to JACMJB010000482.1; note = Cytophagales bacterium
aagccgtaccggacgaaacagcgtcacttacccctcgggaccggcgtcggccactgtaggcgcagtaccgtacaccagtggccggtcgtgtcgtgggccaccgccgaatcagcgcatacgaccggccactggtgtacggtactgcgcctacagtggccgacgccggtccctgggaggtacgtagcgtcgctcaccccgctc

SEQ ID NO: 18694 - RNA, 250 nt, Armatimonas rosea
  source 1..250: mol_type = other RNA; note = Related to NZ_JACHGW010000004.1
gtggagggcggagctaaaatcgttagcctttcaagccttcgggtttgagccacgatgcttcgtcgtggtggccgtaaagctcgctttacatcaccggtcgccgatgcgactcagcgcaggccgcactagtggcggtctaccgttcgcgctgaggagcctgcggccacgccccgtagaccgccactagtgcggcctgcgcctacagtgatcgtcgccggtccctgcaggatagtagcgattccgccctcca

SEQ ID NO: 18695 - RNA, 232 nt, Capsulimonas corticalis
  source 1..232: mol_type = other RNA; note = Related to NZ_BHFQ01000005.1
gtttcgggagcggtgtggttagcaattcgtctgcggcgtttcgccgcggctgccgtgaagatggcttcacttcaccggtcaccgtttctactcagcccggcgacggggtagtgcacccctctgccggcgctgagtcggacgtggcccaccaacagaggggtgcactaccccgtcgccgggcctacagtgaacggcgccggtcctccgtgtcaagtagccgtcgctcccgaaa

SEQ ID NO: 18696 - RNA, 233 nt, unidentified; identical to SEQ ID NO: 18691
  source 1..233: mol_type = other RNA; note = Related to AP024152.1; note = Abditibacteriota bacterium

SEQ ID NO: 18697 - RNA, 226 nt, Desmospora activa
  source 1..226: mol_type = other RNA; note = Related to NZ_PZZP01000001.1
acgaattctactttgtctagctgattgtgcggtgtaccgccgcacatgccgtgatgtgtcacattcatcacccggctccgcgcgacttggcaggcctaatgcggggatacccccctttttcgcctactagtcaagcgtagctacggccaaaaaggggggtatccccgcaggcctgttcagtggcgaagccagctcctatgagttgtagtggacgaagtcgatttcc

SEQ ID NO: 18698 - RNA, 225 nt, Melghirimyces algeriensis
  source 1..225: mol_type = other RNA; note = Related to NZ_FXTI01000004.1
gatgagatgtttgttcagcaaccctgcatggcgtaccgccatgtgtgacgtgatgtgagagattcatcacccggctccgcgcgacttggcaggcccaaagcatcaggggtacctgttaaggagcccctaaacaggcgtagccgctgctcctcaacaggtacccctgatgcgggcctgtacagtggcgaagccaactcctgagatctgtagtgaacaaacactcaa

SEQ ID NO: 18699 - RNA, 234 nt, Thermoflavimicrobium daqui
  source 1..234: mol_type = other RNA; note = Related to QJKK01000010.1
gttcagcaaagagtgacttgtctagccattagcatggtgttacaccatgtatgcaataatgtctcacattcgtcactcggctccgcgctacttaggcaggcctcctatatggggtactagtttgataggtcgcctaaggaggcgtagccgctcctatcaactagtaccccatatagggtcctgttcagtggcgaaaccaagttcgaagagtgttagtagacaagttgtgcaaaa

SEQ ID NO: 18700 - RNA, 213 nt, Thermoflavimicrobium dichotomicum
  source 1..213: mol_type = other RNA; note = Related to NZ_FORR01000019.1
gtgacttgtctagcatctggcatggtgttacgccatgtatgcgtaaatgctgctcattcgtcactcggctccgcgctacttaggcccccgatagtaggggtacatcggtaatagaacacctaagtaggcgtagccgtgatctattcctgatgtacccctactatgggggtacagtggcgaagccaactcccaagagtggtagtagacaagtca

SEQ ID NO: 18701 - RNA, 220 nt, Seinonella peptonophila
  source 1..220: mol_type = other RNA; note = Related to NZ_FQVL01000006.1
atagagatttatctagctgctaatatacggcgatacgctgtgtttgccttgacgtgaacaattcgtcacccggctccgcgctactttggcaggcccaatccacctggtacccccctggattagacctgagtaggcgtggccgtcatatccaggggggtaccaggtggggtcctgtacagtggcgtagccaactcaaggatttttagtagataaatttctg

SEQ ID NO: 18702 - RNA, 226 nt, Desmospora activa; identical to SEQ ID NO: 18697
  source 1..226: mol_type = other RNA; note = Related to NZ_PZZP01000001.1

SEQ ID NO: 18703 - RNA, 213 nt, Kroppenstedtia pulmonis
  source 1..213: mol_type = other RNA; note = Related to NZ_CP048104.1
aagcggtgttcagcaatctgtgcggtgttacgccgcgcttgcaggaacgtgtcacatccatcacccggctccgctctactttggcagggaataggggacctgtacccccttttgccagcctgagtaggcgtcgccactgacaaaagggggtacaggtcccctattccctgttcagtggcgtagccagctcccaagggtatagtggacaccgct

SEQ ID NO: 18704 - RNA, 230 nt, Risungbinella massiliensis
  source 1..230: mol_type = other RNA; note = Related to NZ_LN812102.1
gttcggctatgaaagtctagcaactcgtacggcgttacgccgtgcatgctctcaagctgttttcacttcaaccggcactgcgctacttaggcagcacctatcgtctacgggggctacctgtagagatcctaagtaagcgtagctgctctctacaggtagcccccgtagacgggtgctgttcagtggcatcaccggttcggataggaagaaagtggacttacatagcagaa

SEQ ID NO: 18705 - RNA, 216 nt, Baia soyae
  source 1..216: mol_type = other RNA; note = Related to NZ_SLXV01000034.1
taatacttgtctagcaattttgcatggtgttccgccatgtttgcagaaatgtcttctattcgtcaatcgatctcgcgttacttaggcagaactactaaataggggtacctgtttagctgtctaagtagccgcaggccacaactaaacaggtacccctatttagtagttctgttcagtacgagatccattccaaggtatttttagtagacaagtatt

SEQ ID NO: 18706 - RNA, 216 nt, Shimazuella sp.
  source 1..216: mol_type = other RNA; note = Related to JAKWBN010000001.1
taaaagttatctagctttcttgtgtacggtgttacgccgtatctgcgtgtaagattcacatacttcatccggtcccgcgttactatactagccctaccgtggtggggggtgattgtggccgcctaaagaggcgtagccgctaccacaatcgaccccccaccacgggggctagctcagtggcgttaccagatcatggtgttttcgtagataactttt

SEQ ID NO: 18707 - RNA, 217 nt, Shimazuella kribbensis
  source 1..217: mol_type = other RNA; note = Related to NZ_ATZF01000012.1
tagaagttatctagctatcttgtgtacggtgttacgccgtatcagcgtgtaagattcccatacatcatccggtcccgcgttactatactagacctaccgggtaggggggtgatcgtgagttgcctaataaggcgtagccgcaactacgatcgacccccctacccggggtctagctcagtggcgttaccagatcatagtgttttcgtagataacttct

SEQ ID NO: 18708 - RNA, 222 nt, Hazenella sp.
  source 1..222: mol_type = other RNA; note = Related to JACXAG020000009.1
tgagcatcattgatttagctttttgcatggcgatacgccatgcttgatgtgacgtatacaatccgtcacccgtctccgcttgattagtcaggatcccctactagagggtgcattctatcctgactaatgaggcgtagcctcggcaagaatgcaccctctagtaggggatcctgtccagtggcgaaaacgactccaaagtgttttagtaaatcaatgatgctc

SEQ ID NO: 18709 - RNA, 229 nt, Hazenella coriacea
  source 1..229: mol_type = other RNA; note = Related to NZ_SMAG01000003.1
acatagagacttgttctagcattttgaacacggtgttacgccgtggctgcgttgatgactaacactcgtcacccggctccgcgcgactttggcaggcccttcccgataggtagggtgctaaattctgcctaagtaggcgcagccgcaagaatttagcaccctacctatcgggggtcctgttcagtggcgaatccagctcggagagtcttagtggaacaagttctcaacg

SEQ ID NO: 18710 - RNA, 218 nt, Kroppenstedtia guangzhouensis
  source 1..218: mol_type = other RNA; note = Related to NZ_BMEX01000001.1
ccatccttgttcagcatgattgtatggcgttccgccatgcttgcgttgacggtaccaatccgtcacccggctccgccctacttggcagtcgggggtgtactaccacccgactcggctgcctaaaaaggcgtagccgcagcctcttttgtcgggtggtagtacacccccgactgttcagtggcgaaaccgactcgatggaattttagtgaacacggatg

SEQ ID NO: 18711 - RNA, 229 nt, Laceyella sediminis
  source 1..229: mol_type = other RNA; note = Related to PVTZ01000010.1
acataaaataagactttgtctagccaattgcacagtgatacgctgtgcgggacatgatggcaaacaatcatcacccggctccgcgttacttagtcagccctagtgcaccccttagtgcgttaggttctgcctaagcaggcgtagccggacctaacgactaaggggtgcactagggctttttcagtgcaaacccagatccgaagactgttagtagacaaagtgattcatg

SEQ ID NO: 18712 - RNA, 218 nt, Staphylospora marina
  source 1..218: mol_type = other RNA; note = Related to NZ_CP034118.1
atgactttgtctagcgaagcttcgcgcggcgatccgccgcgttcgacgtgaagtgtcctttcacttcacccggctccgcttgtcttggcaggcacaccacagctgacaccatttgtggcctgcctgggcaggcgtggccgcggccaaaatggtgccagctgtggtgtgcctgctccagtggcgcagccaggtcccaagggtgttggtggacaaagtcg

SEQ ID NO: 18713 - RNA, 221 nt, Tautonia plasticadhaerens
  source 1..221: mol_type = other RNA; note = Related to NZ_CP036426.1
agggaggcagcggtcccattagccgatcgtgcggcgatacgccgcgcaggtccccgtgcccgacactcgtcacgcgcccgaccgccatctgcggccggggcaccgaccaggccctcgcctggttcggttgctccgcaacccgagggccccggtcggtgccccggccgctccagttggccggtcgcgtccgaaggatgttcgtagcgggaccgctgcctccc

SEQ ID NO: 18714 - RNA, 221 nt, Tautonia sociabilis
  source 1..221: mol_type = other RNA; note = Related to NZ_RYZH01000020.1
agggaggcagcggtcccattagccaatcgtgcggcgatacgccgcgcaggtcaccgtgcccgtcattcgtcacgcgcccgcccgccgtctgcggccgggggaccgaccacggccgcagctgggtcggttgctccgcaacccgcggccggcggtcggtcccccggccgctccagttggccggtcgcgtccgaaggtcgttcgtagcgggaccgctgcctcct

SEQ ID NO: 18715 - RNA, 222 nt, unidentified
  source 1..222: mol_type = other RNA; note = Related to JAGQQD010000063.1; note = Planctomycetaceae bacterium
ggaatgggatggtggcaggattagccaattgttcggcgatacgccgagcgggtttccgtgcttgtcattcgtcacgtgtccgttcttcaccccgcgaccggcgtactacccggcccgcgctgggtggagtccacaggcctccgcgggcccacgggtagtacgccggtcgctttagtggaccgaacacgtcctcaggatgttcgtaaccccaccaagtcaccc

SEQ ID NO: 18716 - RNA, 225 nt, unidentified
  source 1..225: mol_type = other RNA; note = Related to JADJAE010000011.1; note = Deltaproteobacteria bacterium
ggacggggcgtggtgagtgacttagcaatctgtgcggcgttacgccgcgcttgtcgaagtgcccgccattcgtcacgagcccgttcatcacacgcgtaccccgacggtgcccggcagcgctctggttgggtgcctccggcaccgcgctgccatggcaccatcggggtacgctttaagtggaacggtcgcgtcccagggatgttcgtaagcccaccgcgccccgtc

SEQ ID NO: 18717 - RNA, 224 nt, unidentified
  source 1..224: mol_type = other RNA; note = Related to JAEUIF010001171.1; note = Planctomycetia bacterium
ggttcgagacagcggactagcttagccgtttgcacggcgttacgccgtgcgggtttccgtgccggtcattcgtcacgtgcccgttcggcacagcgcggcccccgcactagcaggggctcgcgctgggtcgggcccgccgggccccgcggctccctgctagtgcgggggccgcttcagtggaacgagcacgtccgcaggaggttcgtaaggccgctgtctcgact

SEQ ID NO: 18718 - RNA, 233 nt, unidentified
  source 1..233: mol_type = other RNA; note = Related to JADLFP010000276.1; note = Acidobacteria bacterium
ggggagccgggatcgcgtttctagccaagaaggtcatgccttccgtgcggtgtcacgccgcgcttgcccacgtgcccggcattcgtcacgcgcccgtttaccactcgctgccggcggcaccggtcggaccgctcctggatgggtcccgccgggacccgcggtcttcgaccggtgcgccggcgcttcagtcaaacgagcgcgtcccgtggaagttcgtaggacgcccggctccc

SEQ ID NO: 18719 - RNA, 222 nt, unidentified
  source 1..222: mol_type = other RNA; note = Related to MGST01000139.1; note = Deltaproteobacteria bacterium RIFOXYA12_FULL_58_15
tggacggtaggctcgtcgattagccatttgtgcggtgttacgccgtgctggccggaatgcttgtcattcgtcacgagcccgttcgtcacccgcggacaatggactggtgtgcccgcttgctgggtcgtgcccttcgggcaccgcgggctcacaccagtccattgtccgctttagtggaacggtcacgtcgtaggatgttcgtaaacgacgggcctgccgtcc

SEQ ID NO: 18720 - RNA, 223 nt, unidentified
  source 1..223: mol_type = other RNA; note = Related to JAIOJK010002653.1; note = Sandaracinaceae bacterium
acggggcgtgagcccgctgacctagccatccgtgcggcgctacgccgcgcaggcccacgtgcttcgcactcgtcacgtgcccgttcggcacacgcggcccacgcgggctcccgccctatgctgggtgggctgctccgcagccctcgggctttggagcccgcgtgggccgctcaagtggaacggtcgcgtccccaggaggttcgtaggcgccgctcgcgccccg

SEQ ID NO: 18721 - RNA, 223 nt, unidentified
  source 1..223: mol_type = other RNA; note = Related to JACRDB010000039.1; note = Deltaproteobacteria bacterium
acggtgcgcggggtacgcggtcttagcaatccgtgcggtgctacgccgtactttgctcccgtgcctgccattcgtcgcgagcccgttcgtcactcgcctaccacgcgggtgtcgcgcggtcgctggacgggttgttccacaacccaccgcgcgtacacccgcgtggtaggctattggtggaacggtcacgcccaagggatgttcgtaagcgccccgcgcatcg

SEQ ID NO: 18722 - RNA, 222 nt, unidentified
  source 1..222: mol_type = other RNA; note = Related to JAEUKH010000004.1; note = Myxococcales bacterium
gggcgaagggcgacgatgtagcaaccagtgcggcgttacgccgtgcttgtctccgtgcctgtcattcgtcacgagcaggttcgtcacccgcctaccaggggtaccgcgcaaggctactggttcgaccgctccgcggtcagccttgccgcggtacccccggtaggctttctgttgaacccgcgcgtcgatcgtagggatgttcgtacaacacagcccttcgcc

SEQ ID NO: 18723 - RNA, 194 nt, unidentified
  source 1..194: mol_type = other RNA; note = Related to JAIBCE010000260.1; note = Sandaracinaceae bacterium
tcggcctggccattcgtgaggcgctacgcctcgctggctcacacgctccccatccgtcacgggccttgtcggcactcgccgccgcggaccctgcccgcccgcagctgttcggggacctccggtccccgcgggcagtggcagggtccgcggcggctatagtggacccgtcccgtccgagggctctacgcaggccg

SEQ ID NO: 18724 - RNA, 241 nt, Sandaracinus amylolyticus
  source 1..241: mol_type = other RNA; note = Related to NZ_CP011125.1
gcgaggagctccgcgcgcacgagcccactccgtctgtttcggcagcgcggagaccgcggcgttacgccgtggtggaacctgcttcctcatgcaaccccacgcccgatgttcttttgggcgccgcaggggcctgtgtccgacaccggagcgactcgatgagtccgtcggaacacaggcccccgcggcgccttcgtgatcggacgtggtccaacgcacgaagtcgagcacgcggggctcctcg

SEQ ID NO: 18725 - RNA, 219 nt, unidentified
  source 1..219: mol_type = other RNA; note = Related to JACOUT010000011.1; note = Deltaproteobacteria bacterium
acggagcgagcgtgcgcaggtagcaaccgcgcggcgatacgccgcgcatgccgaaatgcccggcattcgtcacgcgcccgttcttcacccgcggcccgcactaccctcagcgcccagctggatcggccgctccgcggcccgggcgctaacgagggtagtgcgggccgcttcagtggaacgagcacgtccgcagcatggtcgtactgcacgctcgctccg

SEQ ID NO: 18726 - RNA, 225 nt, unidentified
  source 1..225: mol_type = other RNA; note = Related to JADZDY010000308.1; note = Deltaproteobacteria bacterium
aggacggagcgagcgcgcgcatgtagcaaccgcgcggcgatacgccgcgcatgcccggatgtcagtcattcgtcacgcgcccgtacttcacccgcggcccgcactaccctcagcgcccagctggatcggccgctccgcggcccgggcgcttacgagggtagtgcgggccgcttcagtggaacgagcacgtcctgagcatgttcgtactgcacgctcgctccgtcc

SEQ ID NO: 18727 - RNA, 223 nt, unidentified
  source 1..223: mol_type = other RNA; note = Related to JAEUKD010000148.1; note = Myxococcales bacterium
acgggacgagaagggcaagatctagcaacccgtgcggtgttacgccgcgcttgcagtcgtgcttcgcattcgtcacccgcctattcgtcactcgacggatcgacacctgtcgtactcgcaagctgtatgggccgctccgcggcccgcggtactgacaggtgtcgatccgtcttaagtggaacaggcacgtcccgagagagtcgtaggtcccgctctcgtcccg

SEQ ID NO: 18728 - RNA, 223 nt, Labilithrix sp.
  source 1..223: mol_type = other RNA; note = Related to JAHBWD010000079.1
ggatggggacgaggccagctctagcaaccgtgcggcgttacgccgtgcttgcctacgtgccgtgcattcgtcacgcgcccgttcgtcactcggcgctcgtcggacccgtccgaccgcatgctgtttgggtcgctccgcgacccgcggtcgtgacgggtccgcgagcgccttaagtggaacgagcacgtccccagggagctcgtagagatctctcgtccccatc

SEQ ID NO: 18729 - RNA, 216 nt, Sandaracinus sp.
  source 1..216: mol_type = other RNA; note = Related to PABA01000151.1
acgaaggcgccgggtctagccatccgcacggtgctacgccgtgctggccgagctgctcgacattcgtcacgagtccgttcgtcaccacgggagccatgccccccgcacccttcgctggttcgacacctccggtgtcccgggctcacggggggcacggctcccattcagtggaacggcctcgtcctccgcaaggaacgtagacgccccgccccgtcg

SEQ ID NO: 18730 - RNA, 208 nt, Clostridium sp.
  source 1..208: mol_type = other RNA; note = Related to NZ_OKRA01000001.1
gaaacacatggatttcttggcctttatactgtggtgttgcgccatggtggagatttgtcatacatacatcattaggttgcgcgcaattcgctacgctactaatactgtgcacattaaaaatcgatccttcggttatgtgacagtattagtgctacgctgaagtgtcacaaccgaatataagaattgttagcaagaaatatatgtagtt

SEQ ID NO: 18731 - RNA, 198 nt, Clostridium weizhouense
  source 1..198: mol_type = other RNA; note = Related to NZ_JAHXPT010000003.1
acatagatttcttggcctttatgctgtggtgttgcgccacggtggagatttgtcaaatacacatcattaggttgcgcgcaattcgctacgctaccaatactgtgggcattaaaaatcgagccttcggttatgccacagtattggtgctacgctgaagtgtcacaaccaaatataagaattgttagcaagaaatctatg

SEQ ID NO: 18732 - RNA, 198 nt, Clostridium uliginosum
  source 1..198: mol_type = other RNA; note = Related to NZ_FOMG01000001.1
acgtagatttcttggcctttatgcctcggtgttgcgccgcggtggagatttgttagacacacatcattaggttgcgcgcaattcgcttcgctaccaatactgtgcacattaaaaatcgagccttcggttatgtgacagtattggtgctacgctgaagtgtcacaaccaaatataagaattgttagcaagaaatctatg

SEQ ID NO: 18733 - RNA, 200 nt, Clostridium tetani
  source 1..200: mol_type = other RNA; note = Related to AE015927.1
tttgtagatttcttggcctttatgctatggtgttgcgccatggtggagatttaccatacatacatcattaggttgcgcgcaattcgctacacgacctataatgtgcacatttaaaaccgatccttcggttatgtgacattataggtgttccgctgaagtgtcacaaccgaatataagaattgttagcaagaaatctataa

SEQ ID NO: 18734 - RNA, 200 nt, Clostridium chromiireducens
  source 1..200: mol_type = other RNA; note = Related to NZ_QXDJ01000001.1
gagataggtttcttggcctttatactatggtggtgcgccatggtggagatttgttagacacacatcatcaggttgcgcgcaattcgctacgctaccaatactgtgcgcttttaaaaccgatccttcggttaagcgacagtattggtgctacgctgaagtgtcacaaccaaatacaagaatagttagcaagaaatctatcc

SEQ ID NO: 18735 - RNA, 200 nt, Clostridium sp.
  source 1..200: mol_type = other RNA; note = Related to NZ_AP024849.1
ttgatagatttcttggcctttatgctgtggtgttgcgccatagttgagatttgttagaaacacatcatcaggttgcgcgcaattcgcttcgctaccactactgtgcacattaaaaaccgatccttcggttatgtgacagtagtggtgctacgctgaagtgtcccaaccagatataagaatagttagcaagaaatctatcg

SEQ ID NO: 18736 - RNA, 200 nt, Clostridium puniceum
  source 1..200: mol_type = other RNA; note = Related to NZ_LZZM01000063.1
aagatagatttcttggcctttatgctgtggtgttgcgccatggttgagatttgtcacatacacaacattaggttgcgcgcaattcgctgcgctaccactactgtgcacatttaaaatcgagccttcggttatgtgacagtagtggtgctacgctgaagtgtctcaaccaaatatgagaatagttagcaagaaatctatca

SEQ ID NO: 18737 - RNA, 209 nt, Cellulosilyticum lentocellum
  source 1..209: mol_type = other RNA; note = Related to NC_015275.1
gtgtactataaatttcttggcctttatgctacggtgtttcgccgtggtgcgtcatatagcttacatacttcactaggctctgcgcaattcgctacgctgccactactgtgcacatttaaaacctatcctgcggttatgtgacagtagtggcgctacgctgaagtgtcataacctaatcattggcttgttagcaagaaatttatagatca

SEQ ID NO: 18738 - RNA, 199 nt, Clostridium cavendishii
  source 1..199: mol_type = other RNA; note = Related to NZ_FQZB01000006.1
gtagtaaacttcctggcctttatgcttcgatgtttcgtcgaggtcgagatttatatgccatacatcaccaggttacgcgcaattcgctacgctaccactactgtgcgactttaaaatctatcctacggtttgtcgacagtagtggtgctacgctgaagtgtcataaccagatataagattgttagcaggaagtttatta

SEQ ID NO: 18739 - RNA, 206 nt, unidentified
  source 1..206: mol_type = other RNA; note = Related to JAAYMT010000202.1; note = Clostridiales bacterium
aaagataacagttcccttggccttattgctgcggtgcttcgccgtggtggacatatgctaagcatacatcaccagcttgtgcgcaattcacttcgcaccactattgtgcacattgagaatggatccttcggctatgtgacaatagtgttgctacgctgaagtgtcacaagcagatagaagtttgttagcaagggaactgttttttt

SEQ ID NO: 18740 - RNA, 200 nt, unidentified
  source 1..200: mol_type = other RNA; note = Related to JACMJL010000131.1; note = Clostridiaceae bacterium
gtaatatactccttggcctttatacctcggcgctgcgccgcggttgagatttaccatacatacatcatcaggttctgcgcaattcgcttcgctactactactgtgcccatttaaaaaggatccttcggttttgggacagtagtagtgctacgctgaagtgtcaaaaccagataggagagtagttagcaaggagtctattg

SEQ ID NO: 18741 - RNA, 198 nt, unidentified
  source 1..198: mol_type = other RNA; note = Related to JAFGGO010000116.1; note = Candidatus Lokiarchaeota archaeon
atattggatttcttggccttcacgcctcggcgttgcgccgcggtcgaaacttgccaagcacacgacacctgggcgtgcgcaactcgcgtcgctacatatagtgtctgattgaaaatggagccttcggtgatcagacactatatgcgctctgctgaagtgtcactcccaactgtgagaaagttagcaagaaatccatta

SEQ ID NO: 18742 - RNA, 248 nt, Paludisphaera sp.
  source 1..248: mol_type = other RNA; note = Related to NZ_JAALJI010000007.1
tcctggaaggtctcttctagctcggtgccctgcaccggggcggcgttgcgccgcccgagtttttcgccgaacatccgtcacaacgaaggctgtttcagactcgcttctcggtgggagtacccctcccggcggggcgggtctgggacaaccccgccggacggggttccgccccgccgggaggggtactcccaccggcgagtcagagagccttcgatgtcccaggtcttgtggtagacggaccgaccagg

SEQ ID NO: 18743 - RNA, 251 nt, Paludisphaera sp.
  source 1..251: mol_type = other RNA; note = Related to NZ_JAHPZK010000021.1
gtcctgaagaggtctgtgctagctcgacgccctgcgtcggggcggcgttgcgccgcccgagtttcacgccgaacatccgtcacagcgaaggctgtttcagactcgcttctcgggggaataacccctccggcgtgggcgggcctggggcaaccccgccggacggggttccgcccacgccggaggggttattcccccggcgagtcagagagccttcgatgtcccaggttttgtggtagacgaacctctcagga

SEQ ID NO: 18744 - RNA, 244 nt, Tautonia sp.
  source 1..244: mol_type = other RNA; note = Related to NZ_WEZF01000007.1
gattggagaacaggtctagctcgacgcttcggcgtcggggcggcgttgcgccgcccgtggaaacgatccgcttcgcatcacaacgaaggctgtttcaggcccgctgatcgccccgggggtgattaccttgtcggcgggcctggtccaaccgcgccgatcgcggttccgccgacaaggtaatcacccccggggcggcgggccagtgagccttcgatgtcccaggtctggtagtagactctccaat

SEQ ID NO: 18745 - RNA, 221 nt, Tautonia plasticadhaerens; identical to SEQ ID NO: 18713
  source 1..221: mol_type = other RNA; note = Related to NZ_CP036426.1

SEQ ID NO: 18746 - RNA, 245 nt, unidentified
  source 1..245: mol_type = other RNA; note = Related to JAIENG010000522.1; note = Gemmataceae bacterium
ccggagaggacaggtctagctgcggtgcttcgcaccagggcggcgttgcgccgccccggcgtttgctatcccgtgcatcacaaggaaggctgttccagtcccgctgtcggcctacgccgaacatgttcacggtcgggctgggacaacctcgcagacgtggttccgaccatgaacatgttcggcgtaggccggcgtgactgtgagccttccgtgtcccaggtcgggtaagtcgagatgcctctccg

SEQ ID NO: 18747 - RNA, 242 nt, unidentified
  source 1..242: mol_type = other RNA; note = Related to JAHQVJ010000095.1; note = Myxococcales bacterium
acggagaggcggaaggtctagccattcggtcggcgttgcgccgcccaggaacaccagcacgcatccttcacaaggaaggctgttccagatcttgattttcggcggtgacgcccctaatcgaggatgggctggttcaacctcgccagtcgcggttccatgcctcgattaggggcgtcaccgccgacaagatcggtgagccttccatgtcccaggtctagcggtagcgaacgcccgcctctccc

SEQ ID NO: 18748 - RNA, 245 nt, unidentified
  source 1..245: mol_type = other RNA; note = Related to LR594586.1; note = Gemmataceae bacterium
ccgtcgagggggccgtccagctcgtcgctctgcgacaggacgatgttgcgtcgtccgagcgtttaccatcccacacagcccgaggaaggctgttccagcaccgctatcggcccgggggcaaccggttcggtcacggtctggagcaaccccgcggttcgtggttccgtgaccgaaccggttgcccccgggccggcggtgccgtgagccttccgcggaccaggtcaggtggtggacgcccctcgatg

SEQ ID NO: 18749 - RNA, 213 nt, Gemmata sp.
  source 1..213: mol_type = other RNA; note = Related to NZ_JAGKQQ010000001.1
acggtgtccgtcgcgatccgagaccaccatgctgcgatgttccgtcgcggttgaagttgctcgcgattgcgtccccaggtgcgttgttcttgttcgcccgccccggaccggtcgggccgaactgaatcgacccgagtcctcggcccgaccggtccggggcgggcgtcgtgaacgcatctggtccacgattgaagtcggttgcggcggacaccg

SEQ ID NO: 18750 - RNA, 247 nt, Zavarzinella formosa
  source 1..247: mol_type = other RNA; note = Related to NZ_JH636447.1
gcaacgaccttgagtttagctcgctgctttgcagcggggcgatgttgcgtcgcccgagcacatggcttgccatgctacccaaggacggctgttccaggaccgctttcgtgggcgcgccccctgatcacccggtggtctggagcaaccccgcgaatcgtggttccaccgggtgatcagggggcgcgcccacggcggtcccgtgagccgtccatgttccaggtcgagtggtaaacaggtcagcgtgatg

SEQ ID NO: 18751 - RNA, 255 nt, Fimbriiglobus ruber
  source 1..255: mol_type = other RNA; note = Related to NZ_NIDE01000001.1
gtcggtcgcaggggaaacgatttagcttagttgctctgcaacggggcggcgttgcgccgcccgagcgtatggcttggcatgcgtcccgaggagggctgttccagacccgctttcggtggggggacgaattactccccaccggtctggtgctaccccgcgagtcggggttccggtgaggagtaattcgtccccccaccggcgggtccgtgagccctccacgtcccaggtcgagtagtaaatcacccctgcggccga

SEQ ID NO: 18752 - RNA, 215 nt, Urbifossiella limnaea
  source 1..215: mol_type = other RNA; note = Related to NZ_CP036273.1
accctgggtcgtcgcgtccgagcctcaccaatgctgcggcgttccgccgcggttgccgatgcttgcgattgcgtcccccgagccgttggtctgttcgccggcacggggtactccccgccggtctgaatcgacctgcgtcaccggcggggagtaccccgtgccggcgtcgtgaacgtctcgggtccacgacagacgtcgggcgcgacgacccagga

SEQ ID NO: 18753 - RNA, 221 nt, Minicystis rosea
  source 1..221: mol_type = other RNA; note = Related to CP016211.1
gcgaggagatccgaccgcccgagcccatcatgctgcggtgctacgccgtggcggagctcggtctaccatgcgtacccacacccgatattcttttgggcgccgagccccagtcgaaggccgtactcagacgaccgcgagcggtctctgccttcgactggggccggcgcctcggtgatcgggcgtggtcccaagggaagtagtcgggcggtcggatttcctcg

SEQ ID NO: 18754 - RNA, 255 nt, Sandaracinus sp.
  source 1..255: mol_type = other RNA; note = Related to JACKED010000003.1
acgacgtggtcgggtcgagtctagcttggtgctctgcaccgtggtcggcgttgcgccgcccgagcgtctcgcttcgcatccgtcacaaggaaggctgttccagaacgtcgctatcgggtcatgcaccctctggtggcggcggtctggttcaaccccgctcgtcgtggttccgcgcgccaccagtgggtgcatgacccggcgagttcggtgagccttccgtgtccctggtcgagtcgtagacccccgaccacgccg

SEQ ID NO: 18755 - RNA, 257 nt, unidentified
  source 1..257: mol_type = other RNA; note = Related to JAGQPF010000572.1; note = Planctomycetales bacterium
gaccggcctggcggcacaggtctagcttggtgttctgcaccgtgggcggcgttgcgccgtccgagaggtttcccacgcattgcgtcacaaggaaggctgtttcagactcgctgatcgtcccctcggactactaattcccagcgagactggagcaacctcgccattcgcggttacgccgtgaattagtagtccgaggggacggcgagtcagtgagccttccatgtaccaggtcgtgaagtagattgccccgggccggt

SEQ ID NO: 18756 - RNA, 254 nt, Roseimaritima ulvae
  source 1..254: mol_type = other RNA; note = Related to CP042914.1
gaatcgtgagagctcaggtctagctaggtgttttacaccgtgggcggcgttgcgccgtccgagagaattgactttcatggggtcacaaggaaggctgtttcagactcgctatcgcccggtaagggtacctattcacggcgagactggagcgacctcgccattcgtggtcacgccgcgaataggtacccttaccgggcggcgagtcagtgagccttccatgtaccaggtcgtgaagtagattgcttttagcgatc

SEQ ID NO: 18757 - RNA, 244 nt, unidentified
  source 1..244: mol_type = other RNA; note = Related to NZ_AP019860.1; note = Candidatus Uabimicrobium amorphum
taaaacttaaaagtttagctcggtagtttaccaagagcggcgtagcgccgttcgagaaaattcttcacattgcagcacaaggaagactgtttcagaacgtcgtgatactagatatagtgtctagtaagcggctgtctgattcaaccgcgccaatcgtagttccgcgcgcttactagacactatatctagtcgagttcagagagtcttccatgtccctagatatgaaagtagacttataagtttt

SEQ ID NO: 18758 - RNA, 237 nt, Thiothrix eikelboomii
  source 1..237: mol_type = other RNA; note = Related to NZ_FUYB01000016.1
gtgaaaagtctagcgtttgatcttcggatccggttggcgttgcgccacctgtgcattaaaccgagcattgcaacacaaggaagactgtttcagcctcgctattgccctagataacgtaccggagtgggtacgagctgggtcaatcgcgccgccgcaatttcgtacccactccggtacgttatctagggcgcgagtcagtgagtcttccatgtaccaggtattaaggtagatttttca

SEQ ID NO: 18759 - RNA, 237 nt, Thiolinea disciformis
  source 1..237: mol_type = other RNA; note = Related to NZ_AQVE01000007.1
aagaaaagtctagcgtttgatcttcggatccggttggcgttgcgccaactgtgcgttaaaccaagcattgcaacacaaggaagactgtttcagcctcgtttatgcactcaatttgttatggagagtgctacgagctgggacaattgcaccactgcaatttcgtagcactctccataacaaattgagtgcacgagtcagtgagtcttccatgtaccaggtagtcaggtagatttttct

SEQ ID NO: 18760 - RNA, 241 nt, Thiofilum flexile
  source 1..241: mol_type = other RNA; note = Related to NZ_KB904782.1
catgaaaagtctagcgattgatcttcggatcaagattggcgttgcgccactctcgaattaaacctaagcattgatcacaaggaagactgtttcagtctcgtttacgcccataaatagtcctcccggcgtactcgagctggaactatcacgcaaacgtgatttcgagtacgccgggaggactatttatgggcacgagccagtgagtcttccatgtacccggtattcaggtagattttttcat

SEQ ID NO: 18761 - RNA, 239 nt, unidentified
  source 1..239: mol_type = other RNA; note = Related to VIAD01000001.1; note = Moraxellaceae bacterium AER2_44_116
aatgaaaattctagcgttaaccttcgggttgaggcggtgatgcgccgcttttgaattaagcttacacattgatcacaaggaagactgtttcagccccgctattgccactaagtacgtgccgtagcagtagcgagctggaacaatcacgcaaccgtgatttcgctactgctacggcacgtacttagtggcgcgggtcagtgagtcttccatgtaccaggtcattcaggtagatttttcat

SEQ ID NO: 18762 - RNA, 247 nt, Psychrobacter nivimaris
  source 1..247: mol_type = other RNA; note = Related to NZ_CAJHAL010000004.1
gagttgtgagatttagcgtttcaccgtttacggtgaggggcgacgttgcgtcgtccacgagtcaagccattacattttacccaaggaagactgtttcagtcctgctaatacctagataaaggccctagtgtcattagctcgctggcgcaatcacgcaatcgtgattgagctaatgcactagggcctttatctaggtgcagtccagtgagtcttccatgtaccaggtcatgaggtagattacacaaca

SEQ ID NO: 18763 - RNA, 247 nt, Psychrobacter sp.
  source 1..247: mol_type = other RNA; note = Related to NZ_VFYU01000031.1
tgtgagatttagcgtttcactgcttgcagtgagggacgatgttgcgtcgtccacgagacaagcctgtacatttgacacaaggaagactgtttcagccctactaatacctaatatagccctctagtgtattagttcgctggcgcaatcacgcaaacgtgattgaactaattacactagagggctatattaggtgtaggtcagtgagtcttccatgtacccagttatgaggtaaatcaacaacacacac

SEQ ID NO: 18764 - RNA, 242 nt, Moraxella osloensis
  source 1..242: mol_type = other RNA; note = Related to NZ_CP047226.1
aagttgtgagatttagcgtttcaccgcaaggtgaagggcgatgttgcgtcgcttatgagtaaagccactacattttgcacaaggaaacctgtttcaggatagctgatacctaaatagggggtctagtgcaatagctcgctggcgcaatcacgcaaacgtgattgagctatagcactagaccccctatttaggtgctatccagtgaggcttccatgtaccatgtcatgaggtaaaccacaact

SEQ ID NO: 18765 - RNA, 254 nt, Zooshikella ganghwensis
  source 1..254: mol_type = other RNA; note = Related to NZ_NDXW01000001.1
actgtacttgctggtcatggtctagcttggtggaaacaccggggcggtgatgcgccgttcttgcttattgctatgcactgtacacaaggaaggctatttcaggctcgctttgccactatataccgttatggtaaccagcgacctgagccaaccacgcaatcgcggttacgctagttaccataacggtatatagtggcgcgatccagtgagccttccatgtcccaagtcatgaagtagatacacagcaagtagaa

SEQ ID NO: 18766 - RNA, 222 nt, Spartinivicinus ruber; identical to SEQ ID NO: 18521
  source 1..222: mol_type = other RNA; note = Related to NZ_CP048878.1

SEQ ID NO: 18767 - RNA, 269 nt, Vibrio azureus
  source 1..269: mol_type = other RNA; note = Related to NZ_CP018616.1
acttaaagggaatgaagtctagcttatatcattttactgttcgtaaaatgatgtgattggcgttgcgccactcctgtatattctctgacatataacaccaagaagattatttcagcatcacgtgtactccctataggggttaagttacgagatgcctggaacaaccgcgtgaacgcggttgcgatctcgcaacttaacccctatagggagtgtgatgcggtgaatcttctaagtcccaagtctagtagtagaataaatttcgctttagg

SEQ ID NO: 18768 - RNA, 254 nt, unidentified
  source 1..254: mol_type = other RNA; note = Related to JAHBVW010000060.1; note = Deltaproteobacteria bacterium
gagaaggagtcgaggagatcgttagccagcacttcggtgcaagagcggcgtcgcgccgctcgggtacaattactggccattctccacaaggtaggctgttcttggtccgctcgcgcgcggggccccatcgcgcactgctcagctggaccaaccacaccaccgcggtttgagcagtgcgcgatggggccccgcgcgcggcgaaccggtgagcctaccgtgtcccatgagggaggtagcgaccctcgactccttct

SEQ ID NO: 18769 - RNA, 250 nt, unidentified
  source 1..250: mol_type = other RNA; note = Related to VBLP01000042.1; note = Deltaproteobacteria bacterium
gaggaggagtcgaatccgttagccagcgctccggcgcaagggcggcgtcgcgccgtccgggcacaatcaagggccattctccacaaggtaggctgttcttggtctgctcgccctgcaggggtactgcgtacgggctcagctggaccaaccacaccactgcggtttgaacccatacgcagtacccctgcagggcggcagaccggtgagcctaccgtgtcccatgagggatgtagcggattcgactcctcct

SEQ ID NO: 18770 - RNA, 251 nt, unidentified
  source 1..251: mol_type = other RNA; note = Related to JADJJK010000055.1; note = Myxococcales bacterium
aaggagaagctctacccgttagcctgcgcgcaagcgcatgggcggcgtcgcgccgcccgggttcaacaactcgccattctccacaaggtaggctgttcgtggtttgctcggccatcgcccctcctagtagtgggctcagctggaccaaccacgccaccgcggtttgagcccactactaggaggggcgatggccggcaaaccggtgagcctaccgtgtcccatgagggatgtagcgggtcagagcttttcct

SEQ ID NO: 18771 - RNA, 254 nt, unidentified
  source 1..254: mol_type = other RNA; note = Related to JADJUF010000001.1; note = Myxococcales bacterium
caggaagaggagtcgccttcgttagcctgcgctccggcgcaagggcggcgtcgcgccgtcccggcacaagcagtagccactctccacaaggtaggctgttcttggttcgctcgcccagaggggccccaattgtcgggtccagctggaccaaccgagcgaacccggtttgcacccaacaattggggcccctctgggcggcgaacctgtgagcctaccgtgtcccatgagggttgtagcgagcgcctcctcttcct

SEQ ID NO: 18772 - RNA, 251 nt, unidentified
  source 1..251: mol_type = other RNA; note = Related to JADJFN010000004.1; note = Myxococcales bacterium
gaagaggagtcgtcttcgttagcctgcgctccggcgcaagggcggcgtcgcgccgtcccggcacacgcagtagccactctccacaaggtaggctgttcttggttcgctcgcccagaggggccccaattgttgggtccagctggaccaaccgagcgaacccggtttgcacccaacaattggggcccctctgggcggcgaacctgtgagcctaccgtgtcccatgagggatgtagcgagcggcgactcccctt

SEQ ID NO: 18773 - RNA, 252 nt, Enhygromyxa salina
  source 1..252: mol_type = other RNA; note = Related to NZ_PVNL01000069.1
ccgtggggttgccgggatcgttagccgtgctcagcacagagcggcgttgcgccgctcgggcacactcttccgacactctccacaaggtaggctgttcgtggtttgcctggcctcgtacgcgtcgaagacgtcgacgtggctgggccaaccacgcaaccgtgggtcacgtcgacgtcttcgacgcgtacgaggccgcaaaccggtgagcctaccgtgtcccaagtgggatcgtagcgacacgatgatcccgcg

SEQ ID NO: 18774 - RNA, 193 nt, unidentified
  source 1..193: mol_type = other RNA; note = Related to JAGQIO010000454.1; note = Myxococcales bacterium
tcgttgtcggggatcgttagccgtgctccgcacaggtcggcgcagcgccgtccgggcacattcttccgacattctccacaaggtaggctgttcgtggtttgtctgggtgcccaagccctcgccggagcagcttggctggaccaaccacgcaaccgtgcttcaagctgctccggcgagggcttgggcacccaca

SEQ ID NO: 18775 - RNA, 253 nt, unidentified
  source 1..253: mol_type = other RNA; note = Related to JAEPMI010000008.1; note = Deltaproteobacteria bacterium
ggagggaaggtcgggttcgttagccggtgcttcggcactcgggcggcgcagcgccgccctggcacgacacttcgtcattctccacaaggtaggctgttcgtggttggcctcgggggagggggtatccccgccacccctagctgggccaaccgcgctaccgaggtttaggggtagcggggataccccctcccccgggccaaccggtgagcctaccgtgtcccatgtgagcaggtagcgagcccggcctttcctc

SEQ ID NO: 18776 - RNA, 241 nt, unidentified
  source 1..241: mol_type = other RNA; note = Related to JACKEN010000012.1; note = Deltaproteobacteria bacterium
ggtggaggagtcgttactcgttagcttttgggcggcgtcgcgccgtccaagctcagtcattcggcaatctccacaaggtaggctatgcgtggtttggctcccaccagggggtactagttgtcggcctagctgggccaaccacgcatccgaggttcaggccaacaactagtaccccctggtggggccaaaccggtgagcctaccgtgtcccatgttggaagtggcggtctcggttcctccac

SEQ ID NO: 18777 - RNA, 253 nt, unidentified
  source 1..253: mol_type = other RNA; note = Related to JAHQVK010000212.1; note = Myxococcales bacterium
gggagaaagctcagctggaagtgagtatgtgcttcggcaccaggatggcgtagcgccatctagtctatctaacttagcattctccacaaggtagcctgttctcgtgctaagtgccaccggtactaggggtgtctggcctagctggatcaaccacgcaaccggggtttaggccgagacacccctagtaccggtggcacttagcacggtgaggctaccgtgtccccagtgggaaggtcactgccaggctttctct

SEQ ID NO: 18778 - RNA, 253 nt, unidentified
  source 1..253: mol_type = other RNA; note = Related to JACQYO010000157.1; note = Deltaproteobacteria bacterium
aggagagagagcgggccgctagcttgtgcttcggcacgcgggtggtgttgcgccacccgtgcgtgatggcctgacatgctccacaaggtaggctgttcgtggttgcctcgccaggagagggtcccctctacgggcgtagctggaccaaccacgcaaccgcggtttacgcccgttagaggggaccctctcctggcggtcaaccggtgagcctaccatgtccctcgtgaggaagtagcgaacccgctccctctcc

SEQ ID NO: 18779 - RNA, 254 nt, unidentified
  source 1..254: mol_type = other RNA; note = Related to JACPFK010000066.1; note = Deltaproteobacteria bacterium
gaggagagagagcgggtcgttagctcgtgcttcggcacgcgggcggtgttgcgccgcccgtgcgtgatggcccgacatgctccacagggtaggctgttcgtggttgcctcgccaggagagggtcccctctccgggcgtagctggaccaaccacgcaaccgcggtttacgcccagtagaggggaccctctcctggcggtcaaccggtgagcctaccatgtccctcgtgaggaagtagcgaaccgctccctctcct

SEQ ID NO: 18780 - RNA, 241 nt, unidentified
  source 1..241: mol_type = other RNA; note = Related to JAGQIK010000702.1; note = Myxococcales bacterium
cgggggagagccgggcaaagttagccatttgggcggcgttgcgccgtcctggccttacaactcggttcactccacaaggtaggctattcgtggtttgctcgccccggacgggtactatggggcgggttagctggaccaaccacgcaatcgcggtttaacccaccccatagtacccgtccggggcggcaaaccggtgagcctaccgtgtcccaggtgggaaagtagcttccggctcttcccc

SEQ ID NO: 18781 - RNA, 253 nt, unidentified
  source 1..253: mol_type = other RNA; note = Related to JAIOJK010001035.1; note = Sandaracinaceae bacterium
tcgaggagagtcggggccgttagcccgtgcaaccgcacgcgggcggcgtctcgccgcccaggcccattcgcagagcatccgccacaaggtaggctgtgcgtggttcggctgccaggagggggtcctgatcacctcccctgctggtccaaccccgcatccgtggtttggggaggtgatcaggaccccctcctggcgccgaaccggtgagcctaccgtgtcccatgtaaggacgtagcggtcccgactctcctcc

SEQ ID NO: 18782 - RNA, 253 nt, Haliangium ochraceum
  source 1..253: mol_type = other RNA; note = Related to NC_013440.1
ggagcgggactcggaagcattagcctgtgcttcggcacacgggcggcgttgcgccgtctaggcttaatctcgacacactcgccacaaggtaggctatgcgtggtttctctaccccaatgggcccctgctcccggggatagctggaccaaccacgcaatcgcggtttatccccaggagcaggggcccattggggtgagaaaccggtgagcctaccgtgtcccatgtaggatggtagtgattccgagttcctctc

SEQ ID NO: 18783 - RNA, 241 nt, unidentified
  source 1..241: mol_type = other RNA; note = Related to JAESTW010000770.1; note = Kofleriaceae bacterium
ggagaagggattgggaaaaagttagccatcgggcggcgtagcgccgtccaggtacagtcttcggacaatcgccacaaggtaggctattcatggtgaatctcccctataggggtacctgcaccacggatagctggaccaacctcacaactgcggtttatccgtagtgcaggtacccctatagggggattcaccggtgagcctaccgtgtcccgtgtaggatagtagctctcaatcccttctc

SEQ ID NO: 18784 - RNA, 253 nt, Sandaracinus sp.
  source 1..253: mol_type = other RNA; note = Related to PABA01000191.1
ggaggggaggacggagccattagcccgtgctcgtcacgggggcggcgcagcgccgtccaggcaacgcattccgacaatctccacaaggtaggctgttcgtggttggcactcgggggagggggtaccgtcggcccccctagctggaccaaccacgccaccgcggtttaggggggccgacggtaccccctcccccgggccaaccggtgagcctaccgtgtcccaggtgagaaggtagcggctccgccctcccctc

SEQ ID NO: 18785 - RNA, 255 nt, unidentified
  source 1..255: mol_type = other RNA; note = Related to JACKDV010000022.1; note = Myxococcales bacterium
ggagagggaaccgagctcgttagccacgtgcttctgcacacgggcggcgctgcgccgccccggttcaacatcactgcatcactccacaaggtaggctgttcgtggtttgtcaggtacggagggggtcgtagcgaccgggttatctggaccaaccacgcagccgtcgttcaacccagtcgctacgaccccctccgtaccacaaaccggtgagcctaccgtgtcccgtgtcgagcagtagcgtctcggttccctttc

SEQ ID NO: 18786 - RNA, 254 nt, unidentified
  source 1..254: mol_type = other RNA; note = Related to JAGQIQ010001415.1; note = Myxococcales bacterium
ggagagggaaccgagttcgttagccacgtgctttgcacatgggtggcgctgcgccaccccggtccaacatcactgcatcgctccacaaggtaggctgttcgtggtttgtcaggtacggagggggtcctagcgaccggattatctgggccaaccacgcaaccgtcgttcaatccagtcgctaggaccccctccgtaccacaaaccggtgagcctaccgtgtcccgtgtcgagaagtagcgtctcggttccctttc

SEQ ID NO: 18787 - RNA, 256 nt, Corallococcus terminator
  source 1..256: mol_type = other RNA; note = Related to NZ_RAVZ01000142.1
gagagaggtctggaccgcatcagccttagcgcctcgagcgcgggagcggcgttgcgccgctctggttgaaatgctggacactctccgcaaggtagcctgttcttggctctctccctccggtgcactggtggccgggtgggaagcggaaccaacgacgcaaccgccgttttcccacccggccaccagtgcaccggaggggagagccggtgaggctaccgtgccccaggtgagctggtggtgcattcctggcctccct

SEQ ID NO: 18788 - RNA, 256 nt, Myxococcus fulvus
  source 1..256: mol_type = other RNA; note = Related to NZ_FOIB01000017.1
gagagaggtctggagtgcatcagcctgagcgcctcgagcgcgggagcggcgttgcgccgctccggtttgaatgcaggacactctccgcaaggtagcctgttcttggctctctccctcccatgcactacggccggggtgggcagcggagccaacgacgcgaccgccgtttgcccaccccggccgtagtgcatgggaggggagagccggtgaggctaccgtgccccaggtgagatggtggtgctttcctggcctccct

SEQ ID NO: 18789 - RNA, 256 nt, Pyxidicoccus fallax
  source 1..256: mol_type = other RNA; note = Related to JABBJJ010000287.1
gagagaggtctggagtgcatcagcctgagcgcctcgagcgcgggagcggtgttgcgccgctccggttggaatgcaggacactctccgcaaggtagcctgttcttggctctctccctcctaggcaccatggcccgggtgggtagctgagccaacgacgcgaacgccgtttacccacccgggccatggtgcctaggaggggagagccggtgaggctaccgtgccccaggtgagatggtggtgccttcccggcctccct

SEQ ID NO: 18790 - RNA, 256 nt, Myxococcus stipitatus
  source 1..256: mol_type = other RNA; note = Related to NC_020126.1
gagagaggtccggagtgcatcagcctgagcgcctcgagcgcgggagcggcgttgcgccgctccggttggaatgcaggacactctccgcaaggtagcctgttcttggctctctccctcctaggcactgcggccggggcgggcagcggagtcaacgacgcgaccgccgttcgcccgccccggccgcagtgcctaggaggggagagccggtgaggctaccgtgccccaggtaagatggtggtgctttcccggcctccct

SEQ ID NO: 18791 - RNA, 256 nt, Citreicoccus inhibens
  source 1..256: mol_type = other RNA; note = Related to NZ_JAHNZT010000021.1
gagagaggtccggagcgcatcagccttagcgcctcgagcgcaggagcggcgttgcgccgctctggttgaaatgcaggacactctccgcaaggtagcctgttcttggctctctccctcctaggcaccatggccacggcgggaagcggagccaacgacgcgaccgccgttttcccgccgcggccatggtgcctaggagggaagagccggtgaggctaccgtgccccaggtgagatggtggtgctttcccggcctccct

SEQ ID NO: 18792 - RNA, 257 nt, Archangium violaceum
  source 1..257: mol_type = other RNA; note = Related to NZ_JPMI01000131.1
cgagagaggtccggaaagcatcagccttcgcgcctcgagcgcgggagcggcgctgcgccgctctggaagcaatgcaggacactctccgcaaggtagcctgttcttggcgctctcccggtagaggggtctaggcctctcggggagctgagccaacgacgcaaccgccgtttccccaagaggcctagacccctctaccggggagcgccggtgaggctaccgtgccccaggtgagcatgtggtgattccaggcctctctc

SEQ ID NO: 18793 - RNA, 257 nt, Cystobacter gracilis
  source 1..257: mol_type = other RNA; note = Related to NZ_JAHXBG010000001.1
gggagaggtcccaaagccatcagcctcagcgcctcgagcgcgggagcggcgttgcgccgctctggatgcaatgcaggacactctccgcaaggtagcctgttcttggctctcttccctcgatcagtactatgacggggtgtagagctgagccaacgacgcaaccgccgtttctccaccccgtcatagtactgatcgaggggagagccggtgaggctaccgtgccccaggtgagcaggtggtgccttgggggcctccct

SEQ ID NO: 18794 - RNA, 257 nt, Stigmatella aurantiaca
  source 1..257: mol_type = other RNA; note = Related to NZ_FOAP01000003.1
cgagagaggtcccaagccatcagcctcagcgcctcgagcgcgggagcggcgttgcgccgctctggttgaaaagcaggacactctccgcaaggtagcctgttcttggctctcttccctccggtactgccctcccgggccggggagctgagccaacgacgcgaccgccgttcccccggcccgggagggcagtaccggaggggagagccggtgaggctaccgtgccccaggtgagaaggtggtgcctttgggcctccctc

SEQ ID NO: 18795 - RNA, 256 nt, Myxococcus sp.
  source 1..256: mol_type = other RNA; note = Related to JACSRE010000153.1
gagcggggtgtcgagatcttcagccttcgcgcttcagtgcgcaggagcggcgttgcgccgctctggagaatcgtccgacatccatcgctaggtagcctgttcttggctctcctcggcagaggggcatcctccgcgtgggagagctgagacaactgcgcgaacgcagtttctcccacgcggaggatgcccctctgccgggagagccggtgaggctaccgagccccaggagagaaggtggtgctttcggcgccccact

SEQ ID NO: 18796 - RNA, 256 nt, unidentified
  source 1..256: mol_type = other RNA; note = Related to JAGNNG010000134.1; note = Deltaproteobacteria bacterium
ggagaggtaccgagcgcttcagcctaagcgcctagagcgcaggaacggtgttgcgccgttctggtcgaactgctggtcaatctccgcaaggtagcctgttcttggttcgctctagctacacccctcggcgtgcagctagtatctgaatcaacgacgccaaccgccgtttactagctgcacgccgaggggtgtagctaggcgaaccggtgaggctaccgtgccccaggtgagaaggtggcgctgctcggcgcctccc

SEQ ID NO: 18797 - RNA, 250 nt, Chondromyces apiculatus
  source 1..250: mol_type = other RNA; note = Related to NZ_ASRX01000060.1
gaggtactgaacgcaccagactccgcgccttgagcgcaggagcggcgtcgcgccgctctggagtaaccactggtcattctcagcaaggtagcctgttcttggttctcttcggcgctacgcgctctacggcgccgggagatctgagacaacgcctcgaccgccgtttctcccggcgccgtagagcgcgtagcgccggagaaccggtgaggctaccgtgccccaagagaagaaggtgatgcgttcagcgcct

SEQ ID NO: 18798 - RNA, 219 nt, Sorangium cellulosum
  source 1..219: mol_type = other RNA; note = Related to NC_010162.1
gcaaggagatccgtccgctcgagcccaacatgctgcggcgctccgccgtggtggaggttgttcttccatgcatccccacccccgatgttctttgggcgcctttagcacctgcgcggttccactcagagggacctgacggtcctggaaccgcgcaggtgcccggcgcctgggtgatcgggcgtggtcacgagcaagtagtcgggcgggcgggcctccttg

SEQ ID NO: 18799 - RNA, 258 nt, unidentified
  source 1..258: mol_type = other RNA; note = Related to JADLAG010000095.1; note = Polyangiaceae bacterium
aggagaggttttgaacgcaccagcctccgcgcctcgagcgcaggagcggcgccgcgccgctctggaggaaccgctcgacattctccgcaaggtagcctgttcttggttctcttcggcatagccggctctactacgccgggagagctgagacaacgtcacgaccgccgtttctcccggcgtagtagagccggcgatgccggagaaccggtgaggctaccgtgccccaagaatagatggtgatgcgctcaatacctctct

SEQ ID NO: 18800 - RNA, 256 nt, unidentified
  source 1..256: mol_type = other RNA; note = Related to JABWBE010000187.1; note = Polyangiaceae bacterium
aggagaggttctgaagcaccagcctccgcgccttgagcgcaggagcggcgccgcgccgctctggaggatccgccagacactctccgcaaggtagcctgttcttggttctcttcgccggtagagcatccctagcgcggggagagctgagacaacgacccgactgccgtttctccccgcgctagggatgctctaccggcggagaaccggtgaggctaccgtgccccatggtagaaggtgatgctttcggggcctctct

SEQ ID NO: 18801 - RNA, 257 nt, unidentified
  source 1..257: mol_type = other RNA; note = Related to JADJRH010000001.1; note = Polyangiaceae bacterium
gtgaggcgcaaatgcgcaccagcctacgcgccttgagcgcaggagcggcgtcgcgccgttctggaaacaccgcctgtcattgttccgcaaggtagcctgttcttggttctcttcgcgctccccacccctgaagcgcgcggagagctgaaccaacgacgcagaccgccgtttctccgcgcgcttcaggggtggggagcgcggagaaccggtgaggctaccgtgccccatgggagaaggtgatgcgacttttcgcctct

SEQ ID NO: 18802 - RNA, 242 nt, unidentified
  source 1..242: mol_type = other RNA; note = Related to NZ_CBTJ020000010.1; note = Candidatus Competibacter denitrificans Run_A_D11
agcgtgaggcgttcctccattagccgtttgggcggcgttgcgccgtccgggatttccaacgccacacacgccacaaggtaggctgttcttggcccgcttcgcctaataccgtgccggtagcatggcggagctgggccaaccacgccaccgcggtttccgccatgctaccggcacggtattaggcggcgggccggtgagcctaccgtgtcccttgtgagaagtagcggtttgcgccctcacgc

SEQ ID NO: 18803 - RNA, 243 nt, unidentified
  source 1..243: mol_type = other RNA; note = Related to CP065007.1; note = Candidatus Competibacteraceae bacterium
gagcgtgaggcgttcctccattagccttttgggcggcgttgcgccgtccgggaattccaacgccacacacgccacaaggtaggctgttcttggccagcttcgccagtacccgcccctagttgtcggcggagctgggccaaccacgccaccgcggtttccgccaacaactaggggcgggtactggcggctggccggtgagcctaccgtgtcccttgtgagaagtagcggtttgcgcctcacgct

SEQ ID NO: 18804 - RNA, 211 nt, unidentified
  source 1..211: mol_type = other RNA; note = Related to JAFKJJ010000105.1; note = Planctomycetes bacterium
aaggtgtccgtcgcgagccgagaccttctctgcggcgttccgccgcgggtgagtttgcttgcgattgcgtccccgggcgcgttgttcttgttcgccgaccgtcacgcgcggtcgccggactgaatcaacctgcgttcacgccgaccgcgcgtgacggtcggcgtcgtgaacgcacccggtccacggatgaagtcggtcgcgacggacaccg

SEQ ID NO: 18805 - RNA, 211 nt, unidentified
  source 1..211: mol_type = other RNA; note = Related to VGZJ01000002.1; note = Planctomycetes bacterium
accaagcggccggctccgagacttaaacgtcctgcggcgttccgccgcgggtgaagtcgccagcgattgcgcccccgagcgcgttgttcttttcgcctccagaaataggtagttggcgaactgaaccgacctgcgttttcgccaactacctatttccggaggcgtcgtgaacgcgctcggtccgggtcggaagtcggagccggccgctttg

SEQ ID NO: 18806 - RNA, 213 nt, Isosphaera sp.
  source 1..213: mol_type = other RNA; note = Related to PNKH01000071.1
tcttcgggtggccggtgtccgagacttcctctgcggcgctccgccgcgggtgacgttggcttgcgatgcgtccccagagccgttggtcttttcgccgggatattcacccccgggcgggactgagccaaccagcgttccccgcccgggggtggatatcccggcggtcgtgaacgactctggtcccggatcgaagtcggacccggccacccgttg

SEQ ID NO: 18807 - RNA, 213 nt, Gemmata sp.; identical to SEQ ID NO: 18749
  source 1..213: mol_type = other RNA; note = Related to NZ_JAGKQQ010000001.1

SEQ ID NO: 18808 - RNA, 219 nt, unidentified
  source 1..219: mol_type = other RNA; note = Related to JAIEQO010000648.1; note = Gemmataceae bacterium
aacttgggcggccggttcccgagcctcaccactgctgcggcggtccgccgcggtttggagtcgcttgcgattgcgtccccggaggcgttggtcttttcgcccgagagttcaagggaggggcggactgtgccaacctgcgtatccaacccctcccttgaactctcgggcggtcaggaacgcccccggtcggcggatgaagtcggggccggccgcccttga

SEQ ID NO: 18809 - RNA, 215 nt, Urbifossiella limnaea; identical to SEQ ID NO: 18752
  source 1..215: mol_type = other RNA; note = Related to NZ_CP036273.1

SEQ ID NO: 18810 - RNA, 209 nt, unidentified
  source 1..209: mol_type = other RNA; note = Related to LSTD01000254.1; note = Planctomycetaceae bacterium SCGC AG-212-F19
tgggggcgtgcagcttcgagaccatcttgctgcggtgttccgccgcggttgacgttggcttgcgttgcatccccagggccgttgttcttttggctggccaccgaggggttgcggcctgcctgagacaacacggtcgcggccgcaacccctcggtggccagccgtgtgaacgtccctggtcggcgcctcgaagtcgaagctgccgccccc

SEQ ID NO: 18811 - RNA, 215 nt, Tuwongella immobilis
  source 1..215: mol_type = other RNA; note = Related to NZ_LR593887.1
ttgcgattcactctccttgcgagacgattctcaggtgttccgcctgggttgaagttgcctgcgattgcgttctccaagccgttgttctttttgcccacatgcccggcaccggcgggtaggctgagccaacggatgttttgcccgccggtgccaggcatgtgggctcggtgaacgtcttggatcctgacttggaagtcgcaaggtggtgcgtcgcg

SEQ ID NO: 18812 - RNA, 218 nt, Aquisphaera sp.
  source 1..218: mol_type = other RNA; note = Related to NZ_JAALJH010000005.1
agggtggccgggccggagctcgagaccaccttgccgcggcgatccgccgcggtcgaccttgccccggagaatgcttccccagcgccgttgttcttttcggccggcggacctacccgcgggccgtgctgagtcgacgtgtccctgcccgtgggtaggtccgccggcctcggtgaacgacgctggtcggcgcctcgaagtcgggtccggcccgtcctccc

SEQ ID NO: 18813 - RNA, 218 nt, Aquisphaera giovannonii
  source 1..218: mol_type = other RNA; note = Related to NZ_CP042997.1
agggtggccgggccggagcccgagaccatcttgccgcggcgatccgccgcggtcgaacgtgacccggagaatgcttccccagcgccgttgttcttttcggcaacaggggctccctgcaggccgagctgagtcgacaggtccctgcctgcagggagcccctgttgccttggtgaacgacgctggtcggcgcctcgaagtcggggccggcccgtcctccc

SEQ ID NO: 18814 - RNA, 218 nt, Paludisphaera sp.
  source 1..218: mol_type = other RNA; note = Related to NZ_JAHPZK010000060.1
agggcgtccgggtcgtttccgagaccaccctgctgcggcgttccgccgtggccgaccttgcctccgtcgttgcttccccgagagcgttgttcttttggcccggtggagagctctcccgccgggctgagtcgaccgatgtccccggcgggagagctctccaccgggcctcggtgaacgccctcggtcgtcgcctcgaagtcggagcggcccggacgccc

SEQ ID NO: 18815 - RNA, 215 nt, Paludisphaera sp.
  source 1..215: mol_type = other RNA; note = Related to NZ_JAALJI010000068.1
tcgaggcgggtcgtcgtcgagaccaccctgccgcggcgctccgccgcggccgagcttgccgcccgcgttgcttccccgagcgcgttgttcttttggcccggtgcgagtacctcacgccgggctgagtcgaccgaagtccccggcgtgaggtactcgcaccgggcctcggtgaacgccctcggtcgtcgcttcgaagtcggcggcggcccgcctcg

SEQ ID NO: 18816 - RNA, 213 nt, Singulisphaera acidiphila
  source 1..213: mol_type = other RNA; note = Related to CP003364.1
gaggcgggccggggcccgagaccagcatgctgcggcgttccgccgtggtcgactctgcccccgagactgcttccccaagagtgttgttcttttggcccggggccgtagccgtacgccgggctgagtcaaccgttgttcccggcgtacggctacagccccgggcctcggtgaacacccttggtcgtcgcttcgaagtcgggcaacggcccgtcc

SEQ ID NO: 18817 - RNA, 217 nt, unidentified
  source 1..217: mol_type = other RNA; note = Related to JAIEMG010000080.1; note = Gemmataceae bacterium
agggggtgttccgacggtgttccgagaccatcttgctgcggtgttccgccgcggttgacgttggctcgtgcatgcttccccaaggccgttgttcttcaggcccgtccgcacgctcgcgggcgggctgaggcaacgagttcccgcccgcgagcgtgtggacgggcctcggtgaacgaccttggtcggcgcctcgaagtcggacctgtcgggcacccct

SEQ ID NO: 18818 - RNA, 214 nt, Stieleria sp.
  source 1..214: mol_type = other RNA; note = Related to JAJKFQ010000002.1
gaggagtgaatcgacgatcgagcctaatttgctgtggtgctacgccatggtgtgagcttgctttgctatgcttccccaagcccgttgttcgttcgccagatacgacaccgtatcggcggactgagtcaacaaggttttcgccaatacggtgtcgtatctggcttggtggaacgtccttggtcaacgcgttgaagtcggtcgctcggacactcct

SEQ ID NO: 18819 - RNA, 214 nt, Rhodopirellula baltica
  source 1..214: mol_type = other RNA; note = Related to PPHI01000001.1
gaggagtgcgtcgtcgaccgagactaatttgctgtggtgttacgccatggtttgagattgcttcgccatgcttccccaaagccgttgttcgttcgccagagactacaccgtagcggcgaactgaagcaacgaggtttacgccgctacggtgtagtctctggcttgggtgaacgaccttggtcaacgcgttgaagtcggtcgcacgaacactcct

SEQ ID NO: 18820 - RNA, 213 nt, unidentified
  source 1..213: mol_type = other RNA; note = Related to NZ_VSZO01000001.1; note = Proposed Roseiconus lacunae
gaggagtgaatcgacgaccgagactaatttgctgtggtgatacgccatggtgtgagattgctttgcgatgctttcccaaagccgttgttcgttcgccagatacgacaccgtagcggcggactgaatcaacacgtttacgccgctacggtgtcgtatctggcttgagggaacgaccttggtcaacgcgttgaagtcggtcgcacgagcactcct

SEQ ID NO: 18821 - RNA, 208 nt, Rhodopirellula pilleata
  source 1..208: mol_type = other RNA; note = Related to NZ_SJPM01000010.1
ttcgtgaagcccaaccgagacctgtttgctgcggcgttccgccgtggtgcgagtttgcttggacatgcttccccaaggacgttgttcgtttcgccgatgacggtatctgtccggtgaactgaggcaacgtggtttcaccagacagataccgtcatcggcttggtgaacgcccttggtcgatccttcgaagtcggttgcggtttcgcga

SEQ ID NO: 18822 - RNA, 217 nt, unidentified
  source 1..217: mol_type = other RNA; note = Related to JAGQQE010000043.1; note = Planctomycetaceae bacterium
agaaggaggaagagcgactaccgagactaatttgctgcggtgttccgccgtggtgcgagtttgccttcacatgctttcccgaggtcgttgttcgttcgccagacacgtcattgtgccggcgactggagcaacgaggttttcaccagcacaatgacgtgtctggcttgagtgaacgccctcggtcggcccttcgaagtcggtactgttcatctccttc

SEQ ID NO: 18823 - RNA, 215 nt, Rubripirellula tenax
  source 1..215: mol_type = other RNA; note = Related to NZ_SJPW01000002.1
gagaggagagtggacacgatcgagaccaatttgctgcggcgttccgccgtggtttgagtttgctttgacatgcttccccaaggccgttgttcgatcgccggatacaccactgtatcggcgggccgagacaacgtggttccctccgatacagtggtgtatccggctgagtgaacgaccttgggcggcgcttcgaagtcgatcgtgccgctacctct

SEQ ID NO: 18824 - RNA, 213 nt, unidentified
  source 1..213: mol_type = other RNA; note = Related to JAEUIP010000375.1; note = Planctomycetaceae bacterium
gaggggtttgggttcgaaccgagactattttgctgtggtgttccgccatggttgagtttgctttgacatgctttcccaaggccgttgttcgttggcccgaccgcgatactagtcggcggctgggacaacgggtttcctccgactagtatcgcggtcgggcttgagtgaacgtccttggtcgacgcttcgaagtcggcgcagtcctgaacccct

SEQ ID NO: 18825 - RNA, 215 nt, unidentified
  source 1..215: mol_type = other RNA; note = Related to DQCF01000782.1; note = Planctomycetaceae bacterium
caggtggggtgggcttgaacacgagactgtcctactgcggtgttccgccgcggttgaaactggcctgagattgcttcaccgtggacctgtcggcctggcccgctcaaggtctctggctgcgaccaattcgacgtggtctcgccgccagagcccagagcgggccgtacgtcagggtctgcggtcgacacttcgaagtcgcgaacactcgcccccct

SEQ ID NO: 18826 - RNA, 212 nt, unidentified
  source 1..212: mol_type = other RNA; note = Related to JAEUII010000041.1; note = Planctomycetaceae bacterium
gagaacagaacatttaccgagactaatatgctgcggtgttccgccgtggttgagtttggctcctcattgcttccccaggaacgttgttctttcggcccgaggtcatctgacccgcgcagctgagtcaacgtggttcacgcaggccagatgacctcgggcctttgtgaacgctcccggtcgacgcttcgaagtcggtgagtttgttctgttcc

SEQ ID NO: 18827 - RNA, 206 nt, unidentified
  source 1..206: mol_type = other RNA; note = Related to JADZDL010000180.1; note = Planctomycetes bacterium
gcacagcaccatgtctgagactcctctgcggcgttccgccgcggatgccctttgactgcccacgcttccccaaggtcgttgttcggtttgccgctatcgcaccgatgcgcgcctaccgagcacaggaccgaggcctttgtcgcacatcggtgcgatagcggctttggtgaacgaccttggtccatggtctgaagtcaggcgctgtg

SEQ ID NO: 18828 - RNA, 204 nt, unidentified
  source 1..204: mol_type = other RNA; note = Related to JAEUHU010000483.1; note = Planctomycetes bacterium
gcacagcccacgtctgagactcctctgcggcgttccgccgcggatgccccacgactccccacgcttccccaaggtcgttgttcggtttgccgctgccgcacctgtgcgcggcgaccgagcacagtccgaggcctttgccgcacacaggtgcggcagcggcttgggtgaacgaccttggtccatggtctgaagtcaggcgctgtg

SEQ ID NO: 18829 - RNA, 210 nt, unidentified
  source 1..210: mol_type = other RNA; note = Related to CADCUQ010000908.1; note = Phycisphaerae bacterium
cacccggtcggccggacgagaccttttctgcggcgatccgccgcgggcgacgtcggccacccatgcgaccccaaggccgttgctcgtttcggcctccggcgacagcctcgccggaccgaagcgagccgaggctctcccggcgaggctgtcgccggaggccttgagtgaacgcccttggtccgaggcgtgaagtcggccgtccggccgggt

SEQ ID NO: 18830 - RNA, 210 nt, unidentified
  source 1..210: mol_type = other RNA; note = Related to NZ_CP063458.1; note = Proposed Humisphaera borealis
ccctggtccggccggccgagaccttttctgcggcgttccgccgtggtcgcggtcggctacccatgcaaccccagacccgttgctcgtttcggcaatcgacgccaccgtcggcggaccgaaacaagcgcgaggctttcccgccgacggtggcgtcgattgccttgagtgaacggccctggtcccaggcgtgaagtcggccggccggccagg

SEQ ID NO: 18831 - RNA, 216 nt, unidentified
  source 1..216: mol_type = other RNA; note = Related to JACQZM010000063.1; note = Candidatus Riflebacteria bacterium
acggcggccttcagctgcctgagaccatcttgctgcggcgttccgccgcggtcgcgatcggcaagacatgcatccccgaggccgttgttcgttttggccacctgtgctaccgcacgggggccgaaacaagccgaggcttccccccgtgcggtagcacaggtggccttggtgaacgtcctcggtcctggtggaaagaagtcaggccgtcggccgccc

SEQ ID NO: 18832 - RNA, 216 nt, unidentified
  source 1..216: mol_type = other RNA; note = Related to JACPRC010000003.1; note = Planctomycetes bacterium
atgcgggggtcatctcccatcgagactgttctgcggtgaatcgccgcgggtgaagatggccagacgtgcgtccccggggccgttgttctttaggctgatccctccggtgcggatggactcagccaagccggggcttctccctaaccgcaccggagggatcagcctcggtgaacgtccccggtcctcggagtgaagtcggggggaatggcccccgca

SEQ ID NO: 18833 - RNA, 214 nt, unidentified
  source 1..214: mol_type = other RNA; note = Related to JACQFK010000217.1; note = Planctomycetes bacterium
cgggggccgtctccctttcgagactgttctgcggcgtaccgccgcggttgaagtcggcctcccatgcatccccggagccgttgtgctttaggctcgtccgacatctcgcgtttggactgagccaagccgaggcttttccccacgcgagatgtcggacgagcctcggtgaacgtctccggtcctgagtgcgtagtcgagagggagcacggctccc

SEQ ID NO: 18834 - RNA, 222 nt, unidentified
  source 1..222: mol_type = other RNA; note = Related to JAGQQS010000445.1; note = Planctomycetaceae bacterium
gagcagggcagagcagttttctaagaccatcctgctgcggcgatacgccgtggttgagttttctttccaattcgtccccagagtcgttgtgcgttcggccagcaattgactgccaccgggcgaccacagcaagcacaaggctttcgcccggcggcagtcaattgctggcccttgtgaacgcctctggtccgcagatcgaagttagaaaatgcctgccctgct

SEQ ID NO: 18835 - RNA, 215 nt, unidentified
  source 1..215: mol_type = other RNA; note = Related to QWOO01000305.1; note = Planctomycetes bacterium
caggagagagcaacgttctaagaccctcttgctgcggcgttacgccgtggttgatcattctttccaactcgtccccagagtcgttgctcgtttggcccgtcgcggagtgcattgcgacgaccaaaacaagccgaggctttcgtcgcaatgcactccgcgacgggccctggtgaacgcctctggtccgcagatcgaagttagacgttgcctctcct

SEQ ID NO: 18836 - RNA, 216 nt, unidentified
  source 1..216: mol_type = other RNA; note = Related to QWPK01000237.1; note = Planctomycetes bacterium
tgggagagagcagcgttctaagaccatcttgctgcggcgttacgccgtggttgattattcttcccaactcgtccccagagtcgttgttcgtttggccagctcacctagtgggctgttcgaccaagacaagcacaaggctttcgctcagcccactaggtgagctggccttggtgaacgcctctggtccgcagatcgaagttagacgttgcctctccc

SEQ ID NO: 18837 - RNA, 214 nt, unidentified
  source 1..214: mol_type = other RNA; note = Related to JACPHK010000356.1; note = Planctomycetia bacterium
cgagggagtgcaacgttctaagactttctctgcggcgttccgccgtggttgagttttctttgcatttcttccccaaggccgttgttcgtttggccggtgacgtcccgtagggcgtcgcccaaatcaagccaaaccttgcaacaccctacgggacgtcaccggccttggtgaacgaccttggtccgaggactgaagttagcacgttgcctccctt

SEQ ID NO: 18838 - RNA, 128 nt, unidentified
  source 1..128: mol_type = other RNA; note = Related to JAGQPR010000143.1; note = Planctomycetales bacterium
gtttgccggtagacgctaccgtgtcaccggccatggcgagctgtgctcaacggtgacacggtagcgtctaccggcttgagtgaacgaccttggtccgttgctgcgaagttagtagattggccaccccg

SEQ ID NO: 18839 - RNA, 215 nt, Posidoniimonas corsicana
  source 1..215: mol_type = other RNA; note = Related to SIHJ01000002.1
ggggcgcgaccggctttccaagacttttctgcggcgatacgccgcgggtgagattggtaaccattgcttccccaaggccgttgttcgttagccggcaacgttaccccgtgcgccggccaagacgagccacagctcaccggcgaacggggtaacgttgccggcctgagtgaacgaccttggtccgcagccgtgaagttgggaagccggccgccccg

SEQ ID NO: 18840 - RNA, 219 nt, Blastopirellula marina
  source 1..219: mol_type = other RNA; note = Related to PZKM01000007.1
cgggagcgaggtgacgattcaagactaccttgctgcggcgatccgccgtggtcgagttttgcatctcattcttccccaaggtcgttgttcgtttggccattaccgacaggtagtgcgtcgaccaggacaagccgaggctttcgacacactacctgtcggtaatggccttggtgaacgacctcggtccgcggacgtgaagttgaatcgtcacccgctccg

SEQ ID NO: 18841 - RNA, 219 nt, Bremerella volcania
  source 1..219: mol_type = other RNA; note = Related to NZ_CP083740.1
cgggagcgaggtgacgattcaagactaccttgctgcggcgatccgccgcggtcgagttttgcttcccattcttccccaaggtcgttgttcgtttggccaccactaccaggtagtgcgtcaaccaggacaagccgaggcttttgacacactacctggtagtggtggccttggtgaacgacctcggtccgcagacgtgaagttgtttcgtcacccgctccg

SEQ ID NO: 18842 - RNA, 219 nt, Blastopirellula cremea
  source 1..219: mol_type = other RNA; note = Related to QPEV01000010.1
cgggagcgaggtgacgactcaagactaccttgctgcggcgatccgccgtggtcgagttttgcctctcattcttccccaaggtcgttgttcggttggccactaacgacatctagtgcgtcgaccaggacaagccgaggctttcgacgcactagatgtcgttagtggccttggtgaacgacctcggtccgcggacgtgaagttgaatcgtcacccgctccg

SEQ ID NO: 18843 - RNA, 219 nt, Stieleria neptunia
  source 1..219: mol_type = other RNA; note = Related to NZ_CP037423.1
ttcgagcgtggtgacgattcaagcctaccttgctgcggcgatccgccgtggctgagttttgcttctcattcgtccccaaggtcgttgttcgtttggccgacggggctacccgttccgtcgaccaaggcaagccaaggctttcgacgtaacgggtagccccgtcggccttggtgaacgacctcggtccgcagacgtgaagttgaatcgtcacccgctcgg

SEQ ID NO: 18844 - RNA, 219 nt, Rhodopirellula sp.
  source 1..219: mol_type = other RNA; note = Related to NZ_ANOF01000123.1
ttagagcgaggcgacgattcaagcctaccttgctgcggcgatccgccgtggttgagttttgcttctcattcgtccccaaggtcgttgttcgtttggccaccaccgcatggtagtgcgtcgaccaggacaagccaaggctttcgacgcactaccatgcggtggtggccttggtgaacgacctcggtccgcagacgtgaagttgaatcgtcgcccgctctg

SEQ ID NO: 18845 - RNA, 204 nt, unidentified
  source 1..204: mol_type = other RNA; note = Related to JACKHI010000001.1; note = Phycisphaerales bacterium
aggccgatcacctgagactttttctgcggcgttccgccgtggttgagattggctttgcatgcatccccaaggccgttgttcgtatggcccaacgcacaccccgtgcggttggccatgacaagccgaggcttcctaccgcacggggtgtgcgttgggccttggttaacgacctcggtccggagatctgaagtcaggtgatcggcc

SEQ ID NO: 18846 - RNA, 222 nt, unidentified
  source 1..222: mol_type = other RNA; note = Related to JACMKE010000965.1; note = Burkholderiales bacterium
gagtggcgggccggccttgaccgagaccatccatactgcggcgttccgccgcggttgcgtctgcccagccatgcttccccacgaccgttgttcgtttgggcccacccgctaccgtgcgctgcggccaagacgacccaagggtcccgccgcgcacggtagcgggtgggcccttggttaacggccgcggtcctgagcgagtagtcggcaagacgacccgccact

SEQ ID NO: 18847 - RNA, 221 nt, unidentified
  source 1..221: mol_type = other RNA; note = Related to JADJTK010000010.1; note = Opitutaceae bacterium
gagtggcgggccggcgcttgctgagaccaccatgctgcggcgttccgccgcggttgcgtttgcctagccatgcttccccacgaccgttgttcgtttggcaccgcaggccactatgcgccgcggccaaaacgacccaagggtcccgcggcgcatagtggcctgcggtgccttggttaacggccgcggtcctaagcgagtagtcaacaagaccgcccgccact

SEQ ID NO: 18848 - RNA, 221 nt, unidentified
  source 1..221: mol_type = other RNA; note = Related to SLWZ01000015.1; note = Proposed Chthoniobacter flavus
gagtggcgggctggtcttcactgagaccaccatgctgcggcgttccgccgcggttgcgtttgcccagccatgcttccccaaggccgttgttcgtttggcaccgcccgctaccgtcgcgggcggccaagacaacccaagggttccgcccacgacggtagcgggcggtgccttggttaacggtctcggtcctgagcgagtagtcagtgagaccacccgccact

SEQ ID NO: 18849 - RNA, 208 nt, unidentified
  source 1..208: mol_type = other RNA; note = Related to JADLHC010000305.1; note = Planctomycetia bacterium
aggaagcggacgtctgagacaggttctgctgcggtgtttcgccgtggctgcccatgcccgtccatgcgtccccagggtcgttgttcgtgttggccggtgcgggtcctgtgcactggccatcacaagccgaggcttgcccgtgcacaggacccgcaccggccttggtgaacgaccccggtccgaaggttgaagtcagccgtccgcttcc

SEQ ID NO: 18850 - RNA, 214 nt, Prosthecobacter sp.
  source 1..214: mol_type = other RNA; note = Related to JAIPJY010000032.1
gaggggacgcatgctcactgagaccatccttgcggtgttccgccgcgaatgaagctgcccgtccatgcatccccaagcccgttgttcggatggccactgtcgccacccgacgcttggccaaggcaacccgaacgttcgcacgcgtcgggtggcgacagtggcctgagtgaacggacttggtcctgagcaagtagtcagtgacgcatgcgcccct

SEQ ID NO: 18851 - RNA, 213 nt, unidentified
  source 1..213: mol_type = other RNA; note = Related to JADJPW010000004.1; note = Verrucomicrobiaceae bacterium
gaggggacgcatgctcactgagaccatccttgcggtgttccgccgcgaatgaagttgcccgtccatgcatccccaagcccgttgttcgggtggcaatcgcgtcacccagcacttggccaaggcaacccaaacgttctcacgtgcgtggtatgcgcaattgcctgagtgaacggacttggtcctgagcaagtagtcagtgacgcatgcgcccct

SEQ ID NO: 18852 - RNA, 206 nt, Rubinisphaera sp.
  source 1..206: mol_type = other RNA; note = Related to NZ_JAALXT010000006.1
cggtcggtcggctgagaccaattgactgtggcgatccgccgcggttgcgttagcctacccattgccttcccagggccgttgttcgtgtggccagccccatcattggcggcggggccacagcaagccacaggctttccccgccgccaatgatggggctggcctgagtgaacgaccctggtccgccgtgagaagtcagccgaccggct

SEQ ID NO: 18853 - RNA, 202 nt, Rhodopirellula rubra
  source 1..202: mol_type = other RNA; note = Related to NZ_JACHXU010000001.1
tcgttccgacgacgcgaagacctgaattgctgcggtgttccgccgtggttgaaattcgagaagcattcgcttcctcgaatcgccggtattgtcccctctccatcggtgagatgggacaatatcacgtacgtgaccatctcaccgatggagaggggacccgacgaatcgggcctcagacgcgaagttggcttcagtcggttca

SEQ ID NO: 18854 - RNA, 216 nt, unidentified
  source 1..216: mol_type = other RNA; note = Related to CP043547.1; note = Planctomycetales bacterium 10988
caggcgaagagagatagaactaagacgatttgctgcggcgttccgccgtggtcgctcatgactttccatgcttccccaaagccgttgttcgtgatccgacaccccgtctagagggagtggaccgacacgagccaaggctctccggatccctctagacggggtgtcggtgagtgaacgactttggtcctttgctagaagttagttccctcttcgctt

SEQ ID NO: 18855 - RNA, 226 nt, unidentified
  source 1..226: mol_type = other RNA; note = Related to JADLAG010000600.1; note = Polyangiaceae bacterium
gcaaggaggtccgcccgctcgagcccaacatgctgcggcgctccgccgcggtggaggttgttcttccatgcatccccacccccgatgttctttttggcgcctttgccaccggtgtcgttccactcagcggaaccagacaagtctggatctggaacgacaccggtggccggcgccttggtgatcgggtgtggtcacgagcaagtagtcgggcgggcgggcctccttg

SEQ ID NO: 18856 - RNA, 219 nt, Sorangium cellulosum; identical to SEQ ID NO: 18798
  source 1..219: mol_type = other RNA; note = Related to NC_010162.1

SEQ ID NO: 18857 - RNA, 224 nt, Chondromyces apiculatus
  source 1..224: mol_type = other RNA; note = Related to NZ_ASRX01000016.1
gcaaggaggtccacccgctcgagcccaacatgctgcggcgttccgccgcggtggcgttcgttctcccatgcattcccacccccgatgtgcgtctgggcgccttaggcctcgacgacaagacccagggagttgcctgacggcggaacctctcgtcgtcgaggccacggcgccctgggtgatcgggtgtggtcaggagcgagtcgtcgggcgggtgggcctccttg

SEQ ID NO: 18858 - RNA, 218 nt, Polyangium fumosum
  source 1..218: mol_type = other RNA; note = Related to NZ_SSMQ01000028.1
gcaaggaggtccgtccgcccgagcccaccatgctgcggcgttccgccgtggcggagttcgttcccccatgcgtccccgcgcccgatgttcttttggccctaaagccccctaccagcatccactcagcggacccttgggtctggatgccggtagggggcctagggcctcggtgatcggacgtggtcctaggcgagtagtcgggcggacgggcttccttg

SEQ ID NO: 18859 - RNA, 218 nt, unidentified
  source 1..218: mol_type = other RNA; note = Related to JADJXL010000001.1; note = Polyangiaceae bacterium
gcaaggaggtcgttgcactcgagcccatcatgctgcggcgttccgccgtggcggagttcgttcccacatgcgtccccaccctcgatgttctttgggtaccccatgccctaggctgcgttcactcagcagacccgagggtctgaacgctgcctagggcacgggtacctgcgtgatcgagtgcggtcctaggagagatgtcgggtgcaacggcttccttg

SEQ ID NO: 18860 - RNA, 218 nt, Polyangium sp.
  source 1..218: mol_type = other RNA; note = Related to NZ_CP079217.1
gcaaggaggtccgtccgctcgagcccaccatgctgcggcgttccgccgtggcggagtccgttcccccatgcgtccccacccccgatattctttgggcgcctatggtacccctccgcacccactcaagcgacccgagggtccgggtgccgaggggtacccaggcgccttggtgatcgggtgtggtccagagcgagtagtcgggtggacgggcctccttg

SEQ ID NO: 18861 - RNA, 219 nt, Pyxidicoccus fallax
  source 1..219: mol_type = other RNA; note = Related to JABBJJ010000008.1
aaggagttcccttccgctcgagcccttcatgccacggtgttccgccgcggcggtggtctctctctcattcgtccccacgcccgatgttctttttgggaatcaggggcaccggcggcctgtaccagccggaccctgcgggtctcggccagccggtgcccccgattcccctcgtgatcggccgtggtccagcgtctgaagtcgggttggaagggaactcct

SEQ ID NO: 18862 - RNA, 218 nt, unidentified
  source 1..218: mol_type = other RNA; note = Related to JACPVI010000075.1; note = Myxococcales bacterium
aggaggccccgctcgcccgagcccttcagtgccgcggtgttccgccgcggcggaagtccgtctctcattcgtacccacgcccgatgctctttttggaattcacgggggtgtgacggcctgaactaatccgacccttcgggtctgggccgcacacccccgcgaattcctcggtgatcggacgtggtcaggggttcgaagtcgggcgagctggggcctcc

SEQ ID NO: 18863 - RNA, 219 nt, unidentified
  source 1..219: mol_type = other RNA; note = Related to JAIBBR010000058.1; note = Myxococcaceae bacterium
aaggaggaacctgacgaacgagtccgctatgccacggtgttccgccgtggcggcagtctgattcaccattacgtcccgacacccgatgttctttgacggaatgcaggcactacgacgctgtgtactgaatcggcccaagggcctgcagcgcgtagtgcccgcattcctccggtgatcggtcgtcgtcatagggaagaagtcgctcgtcagggtcctcct

SEQ ID NO: 18864 - RNA, 221 nt, Minicystis rosea; identical to SEQ ID NO: 18753
  source 1..221: mol_type = other RNA; note = Related to CP016211.1

SEQ ID NO: 18865 - RNA, 225 nt, unidentified
  source 1..225: mol_type = other RNA; note = Related to JADJRH010000011.1; note = Polyangiaceae bacterium
tcaaggagcttcgatcccccgagtccatccagccgcgatgttccgtcgcggcggccgttcgtctaccatgcgtaccctcgcccgatattctttttggcacccagaccacctctcgtacgtgcactcaggggagacgccgagtcgtctctccgtacgagaggtggtcgggtgccttcgtgatcgggcgtggtcctcgggaagtcgtcgggggatcgaagttccttc

SEQ ID NO: 18866 - RNA, 217 nt, unidentified
  source 1..217: mol_type = other RNA; note = Related to JAFEBD010000111.1; note = Deltaproteobacteria bacterium
gcaaggaggcccgagcgcacgagcccatcatgctgcggcgttccgccgtggcggctgttgctgtctcatgcttccccacgcccgatgttcttttgggctcgccgcgtgctgtctcgctccaccagagcgacagatgtctgtatcgacgacagcacgcgcgagcccttggtgatcggacgcggtcctacgcacgaagtcgagcactcgggcttccttc

SEQ ID NO: 18867 - RNA, 217 nt, Labilithrix luteola
  source 1..217: mol_type = other RNA; note = Related to NZ_CP012333.1
gcaaggaagtccgagcgcacgagaccatcatgctgcggcgttccgccgtggcggccgttgcttctccatgcttccccacgcccgatgttcttttgggctcgcagggtgccgtgtcgtttcaccagggcaacagatgtttgctccaaacacggcaccccggagcccttcgtgatcggacgcggtcctacgcacgaagtcgagctctcgggcttccttc

SEQ ID NO: 18868 - RNA, 218 nt, unidentified
  source 1..218: mol_type = other RNA; note = Related to JACRCQ010000074.1; note = Deltaproteobacteria bacterium
aaggaggtccgatcgcacgagcccgtcatgctgcggcgttacgccgtggcggagtctgctctaccatgcatccccacgcccgatattcttttgggcccaggggtgcccacacaccatcctgagtcgacatcaagagtcgctggttgtgtgggcacgccccgggccctcggtgatcggacgcggtccttcgcacgaagtcgagcgcaatcgggcctcct

SEQ ID NO: 18869 - RNA, 221 nt, unidentified
  source 1..221: mol_type = other RNA; note = Related to JADZES010000060.1; note = Deltaproteobacteria bacterium
ccgaggaggaccgagctctccgagcccatgatgctgcggcgctccgccgtggcggacattgctgatcattgcttccccacacccgatgttcttttgggcgccttttgccactacagtgctgcaccaaggcaactccgcggagtttccagcaccgtagtggctcggcgcctgggtgatcgggcgtggtccctagcgagaagtcggtggctcggtcttcctcg

SEQ ID NO: 18870 - RNA, 223 nt, unidentified
  source 1..223: mol_type = other RNA; note = Related to JAEUKI010000057.1; note = Myxococcales bacterium
ccaggaggtcgcgaacacccgagcccacaattcccggtgatccgccggggtgagagaaagctctttcatgcgtcccaacgctcgctgctcttttgcgcgcccatcacccatggtgggacccgccagggcaacgctgcgcgttcggctcccaccatgggtgcgggcgcgctttggttagcgatcgttgtcaggagctggaatgtcgggtgttcgcggcctcctg

SEQ ID NO: 18871 - RNA, 241 nt, Sandaracinus amylolyticus; identical to SEQ ID NO: 18724
  source 1..241: mol_type = other RNA; note = Related to NZ_CP011125.1

SEQ ID NO: 18872 - RNA, 227 nt, unidentified
  source 1..227: mol_type = other RNA; note = Related to JAFLCL010000034.1; note = Deltaproteobacteria bacterium
cgagtgagaggtgaaggcacgagccctcatgctgcggcgttacgccgtggtcgacgttggccttccattgctcacccacgcccgttgttcttttcggtacctgcactagctgtcgttggcaccgaggagagcggcgcgagcggcgctctgccaagcgacagctagtgcaggtaccgtcgtgaacggacgtggtccaggggtagaagtcgagctttcacctctctctc

SEQ ID NO: 18873 - RNA, 227 nt, unidentified
  source 1..227: mol_type = other RNA; note = Related to JAIBCE010000038.1; note = Sandaracinaceae bacterium
ggagtgagaggagcgaggcacgagccctcatgctgcggcgttacgccgtggtcgacgttggccttccattgctcacccacgcccgttgttcttttcggcgcccgcgctagctgtcgttggcaccgaggagagcccgcgagcggagccctgccaagcgacagctagcgcgggcgccgtcgtgaacggccgtggtccagggatagaagtcgagcttcctcctctctctt

SEQ ID NO: 18874 - RNA, 221 nt, unidentified
  source 1..221: mol_type = other RNA; note = Related to JADLFP010000335.1; note = Acidobacteria bacterium
ggagggaggccccgttccccgagaccatccatcctgcggtgttccgccgcgggcgcccgggctctcccatgcttccccacacccgatgttcttctgggctccggcagcctctgccggactccactgaggcaacccgagggtttgaggtccggcagaggctgccggagcctcggtgatcgggcgtggtccgccgtgagaagtcggggatcggggtttccttc

SEQ ID NO: 18875 - RNA, 235 nt, Sandaracinus sp.
  source 1..235: mol_type = other RNA; note = Related to PABA01000104.1
tcgaggaggtctgcgagcacgagcccatcatgctgcggcgctacgccgtggcggagcttcgctacccacccgaccccgcgcccgatgctctgggttggcgccgccgacggcatgcgcctgtcccaagggcaacgcggtaggctgcgcctaccacgtcgacaggcgcatgccgtcgcggcgccgtgggtgatcggacgcggtcccgagcacgaagtcgagctggcagacctcctcg

SEQ ID NO: 18876 - RNA, 229 nt, unidentified
  source 1..229: mol_type = other RNA; note = Related to JADZAM010000038.1; note = Sandaracinaceae bacterium
cgagggagagcctcacgcacgagcccacatgccgcggtgctccgccgcggtggagattgctctcccatgctttcccacgcccgatgttcttggtgggcgccacgcgtgcctaccgcgaacaccaagggcgacccccgcgatgcgggagtccgttcgccgtaggcacgcgtggcgccctcggtgatcggacgtggtcctcggtgagaagtcgagcgtggggctctccctc

SEQ ID NO: 18877 - RNA, 224 nt, unidentified
  source 1..224: mol_type = other RNA; note = Related to SHBB01000309.1; note = Sandaracinaceae bacterium
ggagagactctcgggaggaccgagcccaacatgccgcggcgttccgccgtggtggaggtttgccttccattcactcccacgcccgatgttctgttgggggcacaggtcccctgcagcgctcacgaagggcgactcgggagagtctgagcgccgcaggggacccgtgccccctgggtgatcggacgtggtcctcggaccgagagtcgatctctcgagagtctctc

SEQ ID NO: 18878 - RNA, 217 nt, unidentified
  source 1..217: mol_type = other RNA; note = Related to JACKEC010000023.1; note = Sandaracinaceae bacterium
acgtaccgagacgagaccgagctcatcatgccgcggcgttacgccgcggtggaggttgcccttccatgctctcccacgtccgatgttcgtttggggctgccgtgccccgtgcgcgaacacgagagacgaatcgggagattctgttcgcgcacggggcacgcagccccttggtgatcgaacgtggtccacggacagaagtcgatctccgatgggtacg

SEQ ID NO: 18879 - RNA, 222 nt, unidentified
  source 1..222: mol_type = other RNA; note = Related to JADJGV010000002.1; note = Myxococcales bacterium
gcaaggagatccgcgcgcacgagcccactatgctgcggcgttccgccgtggcgggacttgctccaccattgctcacccacgcccgattttcttttgggccctatgcggtgctagcgctcctcactgagacgaccacgagagtcttgggagccgctagcaccgccgggccctcggtgatcggtcgcggtcctgcgcacgaagtcgagcgagcggatctccttg

SEQ ID NO: 18880 - RNA, 219 nt, unidentified
  source 1..219: mol_type = other RNA; note = Related to JABFYI010000076.1; note = Polyangiaceae bacterium
ccaaggagccacgctcccccgagcccatcatgctgcggcgctccgccgcggtggctgtttctccgcattgcatcccgacgcccgattttcgtggggccgccatcacaggtaggacatgtcacgcagacaacccgagggtttgtcatctcctacctgtgcggctggccttggtgatcggacgtcgtcgtaagtgagtcgtcgagggagcgtggttccttg

SEQ ID NO: 18881 - RNA, 220 nt, unidentified
  source 1..220: mol_type = other RNA; note = Related to JABFXY010000131.1; note = Polyangiaceae bacterium
ccaaggagcctcgctcccccgagcccatcatgctgcggcgctccgccgcggtggccgtatctctgctttgcatcccgacgcccgatgttctgggggccgccaagtcctgcagtcgcgttcacgaaggcaaccacgagggtttgcacgtgactgcaggaccggctggccttggtgatcggacgtcgtcgtcagtgagtcgtcgagggagcgaggttccttg

SEQ ID NO: 18882 - RNA, 215 nt, unidentified
  source 1..215: mol_type = other RNA; note = Related to JAEUKE010000177.1; note = Myxococcales bacterium
caggagcctcgctcccccgagcccatcatgctgcggcgctacgccgcggtggctgtttctctgcattgcatcccgacgcccgattttcgtggggccgccatgtcctaccgtagcgttcacgaaggcaaccccagggtttgctcgccacggtaggaccggctggccttggtgatcggacgtcgtcgtcagtgagtcgtcgagggagcgaggttcct

SEQ ID NO: 18883 - RNA, 215 nt, unidentified
  source 1..215: mol_type = other RNA; note = Related to JACQYO010000047.1; note = Deltaproteobacteria bacterium
tcgaggagaccgggtcgcacgagcccactatgccgcggcgttccgccgcggtggagcttgctatctcgtgctttcccacgcccgttgttcttgggcgccggatcgacaccgtcgtccgcatactcagtcgacgtatctcgctcgacgacggtgtcgatccggctcggtgaacggacgtggtccttcgtatgaagtcgggcgacccggcctcctcg

SEQ ID NO: 18884 - RNA, 215 nt, unidentified
  source 1..215: mol_type = other RNA; note = Related to JACPFK010000116.1; note = Deltaproteobacteria bacterium
tcgaggaggtcgggccgcacgagcccaccatgccgcggtgttccgccgcggtggagattgctacctcgtgctttcccacgcccgttgttcttgggcgccggatcgacatccacgtccgcatactcagtcgacgtatctcgctcgacgtggatgtcgatccggctcggtgaacggacgtggtccctcggttgaagtcgggcgtcccgacctcctcg

SEQ ID NO: 18885 - RNA, 213 nt, unidentified
  source 1..213: mol_type = other RNA; note = Related to JADJBV010000001.1; note = Deltaproteobacteria bacterium
aggagaggatccggacgttcgagtccatgatgccgcggtgttccgccgcgacggagtttgcctgccattgcttccccacgcccgttgttcttttgcgggacgcactgcctgtcttcctgactcattcgacgggtctcgtaatgacaggcagtgcgtcccgctcggtgaacggacgtggtcctcggaaagaagtcgggcgtccggatcctctcc

SEQ ID NO: 18886 - RNA, 220 nt, Sandaracinus sp.
  source 1..220: mol_type = other RNA; note = Related to JACKED010000002.1
aggaggagattcaccgaaccgagcccaccatgccgcggtgttccgccgcggtggcgattggtcttccatgcttccccacgcccgatgctcttgggtggcgccgacacacagcgccaccggacaccagagcgacccaagggtctgccgcccgcgctgtgtgcggcgccatgggtgatcggacgcggtccttcgcgagaagtcggttcggtgagtctcctct

SEQ ID NO: 18887 - RNA, 150 nt, Hyalangium sp.
  source 1..150: mol_type = other RNA; note = Related to NZ_JAHXBF010000024.1
agggggacctggcctcgcagacgagccgtttgtgccgcggtgtttcgccgcggcggcatcttgtccccatcacatcgccgcgggcccagcgtacggaacgcagggctccacgagtccagggcctcgcaagtcgtccagtcccggtcccct

SEQ ID NO: 18888 - RNA, 150 nt, Hyalangium minutum
  source 1..150: mol_type = other RNA; note = Related to NZ_JMCB01000011.1
agggggtccgggcctcgcagacgagccgttcgtgccgcggtgtttcgccgcggcggcttcttgtccccatcacatcgccacggtcccagcgtacgcaacgctgggatccccgagtccagggcctcgcaagtcgtccccgcccggtcccct

SEQ ID NO: 18889 - RNA, 148 nt, unidentified
  source 1..148: mol_type = other RNA; note = Related to JAEUJQ010000080.1; note = Myxococcaceae bacterium
gtggggacggtgggtgcagccgagccagttgaaccacggtgcttcgccgtggtggcgccttgccttcatcaccacgccagggtccccacgtacgcaacgcggggagcccagggtccagagcctcgcaggtcgacccctgccggcctca

SEQ ID NO: 18890 - RNA, 146 nt, Archangium gephyra
  source 1..146: mol_type = other RNA; note = Related to QFQP01000022.1
ttggggagacaggcgcagccgagccagttgaaccacggtgtttcgccgtggtggtgccttgtttccatcacttcgccagggtccccacgtacgcaacgcggggagccccgggtccacagcttcgcaggtcgactcctgtcgcctca

SEQ ID NO: 18891 - RNA, 148 nt, unidentified
  source 1..148: mol_type = other RNA; note = Related to MWCO01000010.1; note = Deltaproteobacteria bacterium ADurb.Bin207
tctcggaagcgctttgcagaaccagcctctcatgctgcggtgtttcgccgcagtggaatgttgcctcctttccaccgccacggtccccacgtgcgtaacgtggggagccatggtgccagagcctcgaagtggttcaggcgattccggg

SEQ ID NO: 18892 - RNA, 221 nt, Archangium gephyra
  source 1..221: mol_type = other RNA; note = Related to NZ_CP011509.1
cggcggtcagggggcagtaccttgcaatccggacggtgtttcgccgtccatgcttcctggcctgtcatgcatcactggcccgctcttcactgtgcggtacctccctcctggtgacggcagcgctgtcgaccgcgtcggtcctgcgcgtcaccaggagggggtaccgcttgagttgagacggtccagtcccgagagcagtacgaaggagctctctgaccgcc

SEQ ID NO: 18893 - RNA, 152 nt, unidentified
  source 1..152: mol_type = other RNA; note = Related to JAFLEF010000003.1; note = Verrucomicrobia bacterium
ataagatccggcggacagagattagccatccatgccacggtgtttcgccgtggtggaccactgcccgacatacttcgccagggttcccaacgttcgcaacgctgggaggccctgagtccagagcctcggaagtaatccgccgccgggtctta

SEQ ID NO: 18894 - RNA, 152 nt, unidentified
  source 1..152: mol_type = other RNA; note = Related to WRPG01000015.1; note = Verrucomicrobia subdivision 3 bacterium
ataaggcccggcggacatgggttagccatcattgccgcggtgtttcgccgcggtggaaacttggtagccatacatcgccagggttccctacgttcgcaacgcagggaggccctgagtccagagcctcggaagtaatccgccgccgggccttg

SEQ ID NO: 18895 - RNA, 152 nt, unidentified
  source 1..152: mol_type = other RNA; note = Related to JAFEGM010000010.1; note = Verrucomicrobia bacterium
agcaggcccggcggactcggattagccaccattgccgcggtgtttcgccgcggtggaaatctgtctgcatgtcatcgccaaggctcccagcgtgcgcaacgccgggaggccctgagtccagagcctcggaagtgatccaccgccgggcctgc

SEQ ID NO: 18896 - RNA, 152 nt, unidentified
  source 1..152: mol_type = other RNA; note = Related to JACSRI010000083.1; note = Opitutaceae bacterium
acaaggtccgccggttcacggccagccatccatgccacggtgtttcgccgtggcggttcgttgtctccattactccgccagggctcccaacgttcgaaacgctgggaggcccagagtccagagcctcgcaagtgaccggccggcggaccttg

SEQ ID NO: 18897 - RNA, 150 nt, Maioricimonas rarisocia
  source 1..150: mol_type = other RNA; note = Related to NZ_CP036275.1
cagcagatccgatcgtgcaaccagccttcatgccgtggtgtttcgccgcggcggcgcattccgctcatcacatcgccacgggttcccacgtacggaacgtgggagcccatgagtccagagccttgcaagtggttttccgccggaccggtt

SEQ ID NO: 18898 - RNA, 149 nt, unidentified
  source 1..149: mol_type = other RNA; note = Related to DTTU01000358.1; note = Phycisphaerales bacterium
tccgagcccgagagatgcaaccagccgcctatgctccggtgtttcgccggagtggagtccttgactcatcacatcgccacggttcccagcgtacgaaacgcgggaggccgcgagtccatagccttgcaagtggagcctctcgggctcgg

SEQ ID NO: 18899 - RNA, 152 nt, unidentified
  source 1..152: mol_type = other RNA; note = Related to JAGOBA010000003.1; note = Alphaproteobacteria bacterium
cccggatcggggcaggttgctccagcttccaacgccacggtgtttcgccgtggttgcttcctgatcccattacatcgccacggttccccacgtacgaaacgtggggaggccacgggtccagagccttgtgggtggtgcaccgcccgatccgg

SEQ ID NO: 18900 - RNA, 152 nt, unidentified
  source 1..152: mol_type = other RNA; note = Related to JABFRX010000136.1; note = Alphaproteobacteria bacterium
cccggatcgaggctggccgttccagcttccaacgccacggtgtttcgccgcggttgccttttgatcccattacatcgccacggctcccatcgtacgaaacgacgggataccacgggtccagagcttagtgggtggatggcggccttgtccgg

SEQ ID NO: 18901 - RNA, 151 nt, unidentified
  source 1..151: mol_type = other RNA; note = Related to JAFMSC010000026.1; note = Hyphomicrobiaceae bacterium
cccgggtctggcagggccttccagcttcctttgccacggcgttccgccgtggtggcctgctactcccatcacatcgccacggctccccacgtacgaaacgaggggaaaccacgggtccaaagccttgttggtggttggccggccggcccgg

SEQ ID NO: 18902 - RNA, 152 nt, unidentified
  source 1..152: mol_type = other RNA; note = Related to JAFECH010000062.1; note = Proteobacteria bacterium
cccggacctgataggatcatccagctttccatgccacggtgtttcgccgcggtggctacctgatcccatcacatcgccacggttccccacgtacgaaacgcggggaggccacgggtccaaagccttgtttgtgggtgttccttcagattcgg

SEQ ID NO: 18903 - RNA, 150 nt, unidentified
  source 1..150: mol_type = other RNA; note = Related to JAFMSG010000097.1; note = Bradyrhizobiaceae bacterium
gcggggcggtacttcaatatccagcaattaacgccacggtgcttcgccgtggttgcgtgttatctccttcacttcgccaaggtccccgacgtacgaaacgcggggagccctgagtccagagcctcgttagtggttaggagtgccgccccg

SEQ ID NO: 18904 - RNA, 152 nt, unidentified
  source 1..152: mol_type = other RNA; note = Related to JAAZAJ010000036.1; note = Planctomycetes bacterium
gccgggcccggcggcctgcaaccagccgatgataccgcggtgtttcgccgcggtggcaaagtgagccgttcacgccgccacggctcccagcgtacgcaacgccgggaggccacgagtccagagcctcgcaagtggttccgcgtcgggctcgg

SEQ ID NO: 18905 - RNA, 150 nt, unidentified
  source 1..150: mol_type = other RNA; note = Related to QQVE01000048.1; note = Planctomycetes bacterium
tccgggcccggcgaactgcaaccagccgttcgtgccgcggtgcttcgccgcggtggcactctgcatgtattacgccgccacggctcccacgtacgaaacgcgggaggccatgagtccagcgccttgcaagtggttcggcgccgggctcgg

SEQ ID NO: 18906 - RNA, 152 nt, unidentified
  source 1..152: mol_type = other RNA; note = Related to JAGQOZ010000372.1; note = Planctomycetales bacterium
gttcgaacccggtggcttgcaaccagccaacgatactgcggtgcttcgccgcggtggcttgctgcgtgtattacgccgccacggctcccacgtacgcaacgtgggaggccacgagtccaaagccttgcaagtggtgcactgccgggttcgaa

SEQ ID NO: 18907 - RNA, 148 nt, unidentified
  source 1..148: mol_type = other RNA; note = Related to WGNR01000010.1; note = unidentified bacterium
cgggcctggcgtgcgtgcaaccagccaacgatgccgcggtgtttcgccgcggtggcctgctgcgtccttaacgccgccacagatcccgtcgtacgaaacgatgggagccacgattccagagccttgcaagtggttcgccgccaggctc

SEQ ID NO: 18908 - RNA, 149 nt, unidentified
  source 1..149: mol_type = other RNA; note = Related to JAFGFF010000467.1; note = Pirellulales bacterium
ccgggcctggcgggctcgcaaccagccaactatgccgcggtgtttcgccgcggcggcatgctgcgtccataacgccgccacggctcccacgtacgcaacgtgggaggccacgagtccaaagcctcgcaagtggttccccaccaggcccg

SEQ ID NO: 18909 - RNA, 152 nt, unidentified
  source 1..152: mol_type = other RNA; note = Related to PSQY01000124.1; note = Proteobacteria bacterium
agagggcacgctggcgtgcaaccagccgggaatgccccggtgtttcgccggggcggcgctttgagcgcattacctcgccacggctccccacgccgcagacgcagggagaccatgagtccagagccttgcaagtggtcggctggcgtgtcctc

SEQ ID NO: 18910 - RNA, 149 nt, unidentified
  source 1..149: mol_type = other RNA; note = Related to CP036279.1; note = Planctomycetes bacterium Pan216
tccggcccttgggcagcgcaattagccgtgatcctacggtgtttcgccgtgggggagtattgggtctcttcacaacgccgcggatcccacgtacgtaacgtgggaagccacgagtccagagcctcgcaagtgattggttcgagggccgg

SEQ ID NO: 18911 - RNA, 129 nt, unidentified
  source 1..129: mol_type = other RNA; note = Related to JACQGK010000369.1; note = Armatimonadetes bacterium
tcgcccaggctagccatcctcccggtgtttcgccggggcggcaccctgtgcccactacatcgccaagctccccatcgcacgaaacgacggggaaagcccgagtccagagcctcgcaagtagcctgggcc

SEQ ID NO: 18912 - RNA, 152 nt, unidentified
  source 1..152: mol_type = other RNA; note = Related to QWHO01000540.1; note = bacterium CPR1
gggaaggctggctcgccagagttagccaacgattccacggtgtttcgccgtggaggcgcattgtcgccatcacgtcgccaaggtccccatcgtgccaaacaatggggagccctgagtccagggcctcgcaggtagcctcgggccagctttcc

SEQ ID NO: 18913 - RNA, 150 nt, unidentified
  source 1..150: mol_type = other RNA; note = Related to JADMJV010000021.1; note = unidentified bacterium
agagtggaatcggaaaatagttagccatctatgctgcggtgtttcgccgcagcggcacattgctgccataacaccgccaaggtccccatcgtacgcaacggcggggagccctgagtcctgggcctcgttagtaacttgcccattccaccc

SEQ ID NO: 18914 - RNA, 150 nt, Steroidobacter agaridevorans
  source 1..150: mol_type = other RNA; note = Related to NZ_BLJN01000007.1
gcgtcgcccggcggcctgcagctagccatctgtccctggtgtttcgccagggcggcgccttgagcgcattacttcgccacggtccccacgtacgtaacgcggggagccatgagtccacggccttgcaggtagccttgccgccgggcaatt

SEQ ID NO: 18915 - RNA, 143 nt, Lujinxingia sediminis
  source 1..143: mol_type = other RNA; note = Related to SADD01000012.1
agggtgagccacccggcgcgagccgaacatgccgcgtgcgtttcgccgcggcggcaccatcttccgatctcctcgccggttctcccacactgtggaagaagcgggcccagagcgtcgcaggtcgcctcgcaggtggctcaccc

SEQ ID NO: 18916 - RNA, 143 nt, Lujinxingia vulgaris
  source 1..143: mol_type = other RNA; note = Related to NZ_VOSM01000004.1
agggtgagccaccgcgcgcgagccgaacatgccgcgtgcgattcgccgcggcggcaccatcttccgatctcctcgccggttctcccacactgtggaagaagcgggaccagagcgtcgcaggtcgcctcgctggtggctcaccc

SEQ ID NO: 18917 - RNA, 141 nt, Lujinxingia litoralis
  source 1..141: mol_type = other RNA; note = Related to NZ_QHKO01000004.1
gagcggtcaccggtcgcgagccagcttcagccgcgtgcgtttcgccgcggcggcaccatcctccgatctcctcgccggttttcccacactgtgggaaaagcgggcccagagcgtcgcaggtcgccctggccggtgactcct

SEQ ID NO: 18918 - RNA, 149 nt, unidentified
  source 1..149: mol_type = other RNA; note = Related to QWHC01000005.1; note = Chloroflexi bacterium CFX4
tcgcacagcaagcgacgcggttagccaacatgctgcgatgtcccgtcgcggtggcaaactgtgcaggtcacttcttcacggctcccacagctcggacaagcgtgggaaccgctccatcacggagatcgtagccgcctgcttgctgtgtg

SEQ ID NO: 18919 - RNA, 136 nt, unidentified
  source 1..136: mol_type = other RNA; note = Related to JADYYJ010000076.1; note = Anaerolineae bacterium
tgaatgcgatgcggttagccattatgctgcgatgttacgtcgtggtgggatgctgaccagatcacgtcttcacaggtacccactctcgaacaagcgggtacctgctccaagatttgaaagtaaccgcatcgccctc

SEQ ID NO: 18920 - RNA, 154 nt, unidentified
  source 1..154: mol_type = other RNA; note = Related to NBMH01000138.1; note = Anaerolineaceae bacterium 4572_78
agggtagcttggttagccgattctgcgatggcacgtcgtggaggcgaattgttcaccacacttcttaatttaatcaccgagtgattaaattacttatgtcaaggttacgtgtaaccttgacataaggttcagtatgttagtaaccaagttaccc

SEQ ID NO: 18921 - RNA, 134 nt, unidentified
  source 1..134: mol_type = other RNA; note = Related to JACCSL010001044.1; note = Ardenticatenales bacterium
ggggtggcccggttagcccttcatactgcggcgttccgccgtggtggagttgtctagccaacccttctgctcaggttcctaccctacgaacaaggtaggagccgcttcaccgcttgttcgtaaccgggccatcc

SEQ ID NO: 18922 - RNA, 138 nt, unidentified
  source 1..138: mol_type = other RNA; note = Related to PSQZ01000251.1; note = Chloroflexi bacterium
cggcagcccggcatagccatttatgccgcggtgttacgccgtggtggagtactagcaccatcactccttcgccggtccacccagctttcgcacaagcgggtggaccgctccgggggctcgaacgtacgccgggctgtc

SEQ ID NO: 18923 - RNA, 221 nt, Archangium violaceum
  source 1..221: mol_type = other RNA; note = Related to NZ_CP069396.1
cggcggtcagggggcagtaccttgcaacccggacggtgtttcgccgtccatgcctcatggcctgtcatgcatcactggcccgctctttactgtgcgcggcctccctccctgtcgccgcagcgatgtcgacctcgtcggtcctgcgcgcgacagggagggggccgcgcttgagttgagacggtccagtcccgagagcagtacgaaggtgctctctgaccgcc

SEQ ID NO: 18924 - RNA, 158 nt, Polyangium spumosum
  source 1..158: mol_type = other RNA; note = Related to NZ_WJIE01000006.1
ggctcacgggaggcgcgagcagccagctatcaccccgcgatgtcacgtcgcggctgcgaacgactccccatggagaatgaagcgtcacggggaccgccccgcagggcttttcgtccccgtacgcctctgccgagcaggtggcgacgcctcccgtgagc

SEQ ID NO: 18925 - RNA, 218 nt, Polyangium sp.; identical to SEQ ID NO: 18860
  source 1..218: mol_type = other RNA; note = Related to NZ_CP079217.1

SEQ ID NO: 18926 - RNA, 256 nt, Myxococcus stipitatus; identical to SEQ ID NO: 18790
  source 1..256: mol_type = other RNA; note = Related to NC_020126.1

SEQ ID NO: 18927 - RNA, 148 nt, unidentified
  source 1..148: mol_type = other RNA; note = Related to JAACJQ010000343.1; note = Archangiaceae bacterium
ccggagtcgtgttcggctagccatctccgcgatgtcacgtcgcgggtgaacacgattcaccatgaagaatgaattggcgcgtgagtcgcctcgcggcttcttcactcatgctctcctctgcaggcaggtaacctcaagcgcgactccg

SEQ ID NO: 18928 - RNA, 153 nt, unidentified
  source 1..153: mol_type = other RNA; note = Related to JACCSS010001187.1; note = Deltaproteobacteria bacterium
tccccggagtgtggtcgagctagccttctgtcgatggtggtacgccatcgctgacaacgaccgaccatgaaacacgaagaggtgcgtggcttcgttgcctctccacacagccataccctcctctgccgagcgagtagacgccacgctccgggg

SEQ ID NO: 18929 - RNA, 152 nt, unidentified
  source 1..152: mol_type = other RNA; note = Related to JAEUKA010000036.1; note = Myxococcales bacterium
gttccttcgatcgctccgcagttagcttcctccgcgatgttacgtcgcggttgctttcgacctgcaatggacaatgcgctggtccgagctgccgcttgcggcttttctcagctcggtcaccgctgccacgcaagtagctgcgatcgaaggag

SEQ ID NO: 18930 - RNA, 154 nt, unidentified
  source 1..154: mol_type = other RNA; note = Related to JAEUKB010000029.1; note = Myxococcales bacterium
cgttccttcgatcgccacgcagttagcttcttccgcgatgctacgtcgcgggtgcgtacgacctacaatggacaatgcgctggaccgagctgccgcttgcggcttttctcagctcgggcaccgctgccacgcaagtagctgcgatcgaaggaac

SEQ ID NO: 18931 - RNA, 248 nt, Pseudenhygromyxa sp.
  source 1..248: mol_type = other RNA; note = Related to JABJWV010000001.1
taggagccccgggatcatcagccgtgctcagcacagggcggcgccgcgccgtccgggcaaattctcccgacatgctccacaaggtaggctgttcgtgctttccctggccccgtagaggtcgtagacgacctcgtggctggggctaccacgcaaccgcggttcacgaggtcgtctacgacctctacggggccggaaagcggtgagcctaccgtgtcccaggtgggatcgtggcgacttcggtcgctcct

SEQ ID NO: 18932 - RNA, 213 nt, Gemmata sp.; identical to SEQ ID NO: 18749
  source 1..213: mol_type = other RNA; note = Related to NZ_JAGKQQ010000001.1

SEQ ID NO: 18933 - RNA, 160 nt, unidentified
  source 1..160: mol_type = other RNA; note = Related to JAIOPV010000289.1; note = Planctomycetes bacterium
attcacggttcgcggttgaagttagcgaaaaccacggtgttacgccgtgggtggttttcagtgccgaccagttcagatcgggtctactccgagactcgcaccaggggcggtctcggagcagaccgtgccgcaggaggaaagtagccccgcgatccgtgag

SEQ ID NO: 18934 - RNA, 212 nt, unidentified
  source 1..212: mol_type = other RNA; note = Related to LR594584.1; note = Gemmataceae bacterium
acggtgtccgtcgcggtccgagaccaccatgctgcgatgttccgtcgcggttgaagttgctcgcgattgcgtcccccgagccgttggtcttttcgcccggtcagggctccctggactgggctgaatcgacctgcgtccccagtccagggagccctgaccgggcggcgtgaacgtctcgggtcccggatcgaagtcggccgcggcggacaccg

SEQ ID NO: 18935 - RNA, 155 nt, unidentified
  source 1..155: mol_type = other RNA; note = Related to JAIEMG010000136.1; note = Gemmataceae bacterium
agtttccgtccgcaccggaggtagcgacatctgcggcgttacgccgtgggaggtttgcagtgcccgccggtcaagacggtgtgcctgttccatacaggtatggaccaggcgcaccggtgcccataggaggtaagtagctcggtgcgggcggaaac

SEQ ID NO: 18936 - RNA, 150 nt, unidentified
  source 1..150: mol_type = other RNA; note = Related to JAEUIF010000053.1; note = Planctomycetia bacterium
gttccgcccgcgctggaggtagcgctgactgcggcgttacgccgcggatggacactacttgtgccaagcaagaacgtccacccgggcctctacagatagggcccgggcggacagggcctatcggaggtaagtagctcggcgcgggcggaa

SEQ ID NO: 18937 - RNA, 164 nt, unidentified
  source 1..164: mol_type = other RNA; note = Related to VGYW01000017.1; note = Planctomycetes bacterium
cggaagggcggggagagagctttagccgacacgcaagtgtcgctgcggcgttacgccgcggacgtgccctagctcgcttcacgccagcagaatattccagtggtcgttccgaccactgaaatattcggcgcaggagagcgacgtaaagccctccccgccccccg

SEQ ID NO: 18938 - RNA, 224 nt, unidentified
  source 1..224: mol_type = other RNA; note = Related to SOJX01000071.1; note = Planctomycetes bacterium
ccggcggggaccggccgaactttagctcgtgcgtaaccaatcgcaaccgcggcgttccgccgcggatggagtatcgcaacccttcgcttctacggatgtccgcaaggtcggaagaccttgcaagcaaggtcttccgaccttgcgacatccgtgcagctcgtggggttatttatcgaaaacaagttttcgataaataacccctggtaaagtaccggtccccgccg

SEQ ID NO: 18939 - RNA, 120 nt, unidentified
  source 1..120: mol_type = other RNA; note = Related to MVDA01000360.1; note = Desulfobacteraceae bacterium 4484_190.1
ctgatgccggagcctgaattttagcttttcgtatggtgttacgccatgcaagcctgtcaccttgcttcgcacagccgcgagctatctcccggctgttatagtaaatcggctccggcgtca

SEQ ID NO: 18940 - RNA, 157 nt, unidentified
  source 1..157: mol_type = other RNA; note = Related to MHBH01000069.1; note = Lentisphaerae bacterium GWF2_49_21
tgacggagcggcagtagatttttagatcgtgcgcggtgtttcgccgcgcttgcgttactacccggcttagtccaaggagattaaaaattctttttaatctccatggactataaatggctatgccatatggttgacaagtaaaaactgccgctccgtc

SEQ ID NO: 18941 - RNA, 159 nt, unidentified
  source 1..159: mol_type = other RNA; note = Related to JAFGPY010000175.1; note = Planctomycetes bacterium
ggccgaggcggccgatcggattagtcatggggcggcgtttcgccgtccaagccggttacatcttcactgccgtccgcggcgctccaccggttgaggctgatgctcaaccgccggcgccgcggggttcggatcggatagtaatcacgcggtcgcctcggc

SEQ ID NO: 18942 - RNA, 132 nt, unidentified
  source 1..132: mol_type = other RNA; note = Related to JAADGH010000108.1; note = Planctomycetes bacterium
aggtggcgggccgagagagttttagatttgtgcggcgattcgccgtgcgtgcgctttgcgccatcaaccagcctttgttcctgctgagagcaggaacgcagaatggatgcatagtaaaaccggtccgccacc

SEQ ID NO: 18943 - RNA, 150 nt, unidentified
  source 1..150: mol_type = other RNA; note = Related to JAFGGJ010000038.1; note = Planctomycetes bacterium
gcgacgggagggagacaggcttagaacgcgtgcggcgtttcgccgcgccggtgtacgcctttttccaacggctcgatcggagtcggaggataacgcgttatccaccgctccggagcataagcaggctcaggtaagtgctccctcccgccc

SEQ ID NO: 18944 - RNA, 171 nt, unidentified
  source 1..171: mol_type = other RNA; note = Related to JAGOOG010000002.1; note = Deltaproteobacteria bacterium
agaagggcagtcggtaaatgcttagatcgtcgcggcgtttcgccgtggttgccgcatctacagaacatactgccaatgccgcatgagtcaccacaggcctgcggccacatggtgattcatgtggcagtgtcgattcatagtaatgcttagtaaggtgaccgactgtccttc

SEQ ID NO: 18945 - RNA, 188 nt, unidentified
  source 1..188: mol_type = other RNA; note = Related to JABHSU010000643.1; note = Planctomycetaceae bacterium
aaaatgcgatagccttggcgttttatagggtgatgtttcgtcatccttggaaattgcagttgggaaaggtatttgtgctgcccgtagcatacggtgcagttaaaacttgccttgcttcgctgcgttatttttaactgcaccgtatgctacgggcagcattggcatagccatagcagggagtcgtctta

SEQ ID NO: 18946 - RNA, 180 nt, unidentified
  source 1..180: mol_type = other RNA; note = Related to PBCP01000062.1; note = Planctomycetaceae bacterium
cgatagccttggcgaattatagggtgatgtttcgtcatccttgtttaacattgcgacgagcggaaattgtgcaacactacggaaagctcaatttcattactacgcttcgcttcgtaatgaaattgagctttccgtagtgttgcattggcgtagccacagcagggaatcgtcggggttggc

SEQ ID NO: 18947 - RNA, 180 nt, Rhodopirellula sp.
  source 1..180: mol_type = other RNA; note = Related to NZVD01000016.1
ggtcagatagccttggcgaattatagggcgatgcttcgtcgtccttgtaaattgctgcatcgaacgggatttgtgaacatcgtagataatacggcgttcctacgtcctcgcttcgctgcggagtaggaacgccgtattatctacgatgttcattggcatagccatagcaaggaatctgat

SEQ ID NO: 18948 - RNA, 165 nt, unidentified
  source 1..165: mol_type = other RNA; note = Related to PBHI01000033.1; note = Planctomycetaceae bacterium
acgatagccttggcgaataatagggcgatgtttcgtcgtccttgtaatttggttcgcggataagtagttgtgcgtacggttcgatccataaatcaagggtcgctccgctccgcctttatttatggatcgaaccgtacgcattggcattgccatagcaaggaatcg

SEQ ID NO: 18949 - RNA, 175 nt, Proteus mirabilis
  source 1..175: mol_type = other RNA; note = Related to JAEHOZ010000020.1
aattcaattacggagcggcgaagaattgtcgcgagggtgtgcatcatgcccgtttgcgaaggctaggcacagaaacaccgatggacaaacgtccattcgtgcttcgcccgactggacgtttgtccatcgttgtaaatttaatgaaaagaacagtgtcatgaatgccgcgccgctc

SEQ ID NO: 18950 - RNA, 170 nt, Parashewanella spongiae
  source 1..170: mol_type = other RNA; note = Related to NZ_ML064597.1
aattcaaatacggagcggcgaaaaattgtcgcgagggtgtgcatcatgcccgtttgcgaaggctagacacagaaacaccgatggacaaacgtccattcgtgcttcgcccgactggacgtttgtccatcgttgtaaatttgatgaaaagtacagtgtcatgaatgccgcgc

SEQ ID NO: 18951 - RNA, 157 nt, Alteromonas sp.
  source 1..157: mol_type = other RNA; note = Related to SIHM01000015.1
tttacctacggagcggcgaatgattgtcgcgagggtgtggatcatgcccgtttgcgaaggctagacacagaaacaccgatggacaaacgtccatccgtgcttcgcccggctggacgtttgtccatcgttgtaaattttattaaaagtacagtgtcat

SEQ ID NO: 18952 - RNA, 171 nt, Maribrevibacterium harenarium
  source 1..171: mol_type = other RNA; note = Related to VFRR01000008.1
tgcaaaaacggagcggcgaagaattgtcgcgagggtgtgcatcatgcccgtttgcgaaggctagacacagaaacaccgatggacaaacgtccatccgtgcttcgcccggctggacgtttgtccatcgttgtaaattttttgaaaagtacagtgtcatgaatgccgcgccgc

SEQ ID NO: 18953 - RNA, 158 nt, Vibrio owensii
  source 1..158: mol_type = other RNA; note = Related to NZ_CP025796.1
taaaaaacggagcggcgataaattgtcgcgagggtgtgtatcatgcccgtttgcgaaggcttgacacagaaacaccgatggacgaacgtccatccgtgcttcgcccggctggacgttcgtccatcgttgtaaacatcttgaaaagtacagtgtcatga

SEQ ID NO: 18954 - RNA, 167 nt, Vibrio anguillarum
  source 1..167: mol_type = other RNA; note = Related to RDPS01000003.1
taaaaaacggagcggcgataaattgtcgcgagggtgtgtatcatgcccgtttgcgaaggcttgacacagaaacaccgatggacgaacgtccatccgtgcttcgcccggctggacgttcgtccatcgttgtaaacatattgaaaagtacagtgtcatgaatgccgcgc

SEQ ID NO: 18955 - RNA, 170 nt, unidentified
  source 1..170: mol_type = other RNA; note = Related to PGZF01000003.1; note = Gammaproteobacteria bacterium HGW-Gammaproteobacteria-15
tatattgcatgggagcggcgatgaattatcgcgagggtgtgaatcatgcccgcttgcgaaggctagacacagaatcaccgatggacaagcgtccatccgtgcattcgcccaaatggacgcttgtccatcgtcgaaacttatttatgagatttgtgtcatgaatgccgcgc

SEQ ID NO: 18956 - RNA, 161 nt, Acinetobacter bereziniae
  source 1..161: mol_type = other RNA; note = Related to JAEDYI010000001.1
tggctttaggagcggtgaaacagttacgcgagggtgtgtatcatgcccgtttgcgaaggctagacacagaatcactgatggacttgagtccactagtgcttcgcccaattggactcaagtccatcattgaaacattttgaattttgagaattgtgtcatga

SEQ ID NO: 18957 - RNA, 175 nt, Serratia fonticola
  source 1..175: mol_type = other RNA; note = Related to JACBJC010000018.1
attatgctttaggagcggtggtttattttcgcgagagagtgtatcattctcgttagcgaaggccagacacagaagcatcgatggacatgcgtccattcgtgcttcgcacaactggacgcatgtccatcgttgtcaataaactgattagctaaggtaagtgtcatgaatgccgcac

SEQ ID NO: 18958 - RNA, 163 nt, Shewanella insulae
  source 1..163: mol_type = other RNA; note = Related to NZ_WRPA01000017.1
tatggattaggagcggcggtgaattatcgcgagggtatgaatcatacccgctggcgaaggctaggcacagaagcatcgatggactcacgtccatcttcgcttcgctcatcaggacgtgagtccatcgttgagaaagaaataatgttaaagagatttgtgtcat

SEQ ID NO: 18959 - RNA, 164 nt, Kangiella aquimarina
  source 1..164: mol_type = other RNA; note = Related to NZ_KB893650.1
attttttaggagtggtgctaatggtttgcgagggtgtgtatcatgcccgtgagcaaagagctaatatagaagggtgttggatacttatcctgcgctccttcgaagcacatgataagtatccaacacgcacaaagaaactgttttgtattaaggcgtcagtgcta

SEQ ID NO: 18960 - RNA, 181 nt, unidentified
  source 1..181: mol_type = other RNA; note = Related to JAFEDC010000007.1; note = Proteobacteria bacterium
aattgattcgagaagtggcgatttttaatcgtgagggtgtgtatcatgcccgtttgcgaaggctaggcatagaaggcggacggataattatctgccgatccttcgaatcgacagataattatccgtcggcattgaagaaacttaaatagatattgtgtatgccatgatagctccgccactt

SEQ ID NO: 18961 - RNA, 178 nt, Nitrospira sp.
  source 1..178: mol_type = other RNA; note = Related to JAFIUX010000008.1
aattacagagaggagtggcggtttgtggtcgcgagggtatgtatcatgcccgtttgcgaaggctaggcacagaagggcggcggaagattctcagtcgctccttcgaaccggctgagaatcttccgccggcatcaaagaaactcgaactggatttagtgccatgttagctccgccactc

SEQ ID NO: 18962 - RNA, 165 nt, Methylovulum psychrotolerans
  source 1..165: mol_type = other RNA; note = Related to PGFZ01000010.1
taaattcgggagaggaggttattactcgcgagggtgtgcatcatgcccgtatgcgatggctaggtacagaagaagcgatgaaataaatccaccgctccttcgaatcgatggatttatttcatcgctttcttaaagaaactattatttttactatgaaagccccgc

SEQ ID NO: 18963 - RNA, 175 nt, Marinobacter adhaerens
  source 1..175: mol_type = other RNA; note = Related to VENC01000012.1
aatattcgtggggagcggcggctccaactcgtgagggtgtgtatcatgcccgtttgcgaaggctaggcacagaaggtcggtggaacaaagcccatcgctccttcggatcgctggactttgttccaccgatatcaaagaaacgtattgagatagtgtcatgatagccgcgccgctc

SEQ ID NO: 18964 - RNA, 177 nt, unidentified
  source 1..177: mol_type = other RNA; note = Related to CP064972.1; note = Holophagales bacterium
cactagtctgaatggcggcggctttgcgcgcgggcgtgcatcacgcccagccgttgcgcaggtcagccacagaagggcgccggctcctcgccggtcgctccttcggatcgctcgacgaggagccggcgatctcaatgaaagcctccgggctttgctaatcccgtgaagccgccgcca

SEQ ID NO: 18965 - RNA, 178 nt, unidentified
  source 1..178: mol_type = other RNA; note = Related to JAGQSE010000087.1; note = Acidobacteria bacterium
aacttcatcttcgcggcggaggtgttccgcgagggtgtgcatcacaccccttttgcgaaggctagtcatagaagggcgccagctcagaggccggcgctccttcagatcaccggcctctgagctggcggtcccaacgaaagctttgatagctttgctcttcccgtgaacactccgccgc

SEQ ID NO: 18966 - RNA, 167 nt, unidentified
  source 1..167: mol_type = other RNA; note = Related to JADFXO010000295.1; note = Nitrospirae bacterium
gctattttataggaatggcggaatggaatcgtgagggtgtgtatcatgcccaattgcgaaggtcaggcacagaaggacgacggcctaacggctgtcgttccttcgtcgcgccagccgttaggccgtcgtcatcatcgaaagtaagtaaaactttgctgtcgccatga

SEQ ID NO: 18967 - RNA, 176 nt, unidentified
  source 1..176: mol_type = other RNA; note = Related to JAHJTB010000218.1; note = Proteobacteria bacterium
taaaacaaggagaggtggagattcctcgcgcgggtatgtatcatgccctgaagcgaagatcaggcacagaagggcggctgccaatcggctgtcgctccttcgaaccgaacagccgattggcagccggaactcacgtaagtcctatggacttagcttaagccatgaatgctccacct

SEQ ID NO: 18968 - RNA, 186 nt, Pseudomonas fluorescens
  source 1..186: mol_type = other RNA; note = Related to QFOU01000006.1
ggtagtctctattcggtggtgcctgcttgcgagggtttgtatcattcccatttgcaaagaccagacacagaagatcgccgaatcgaaaggccgattttactgcgaaaaatcgccctttcgactcggcgattccaatgaaagcatttttagctttgctagtaaggttgtctaatgcagtcaccacca

SEQ ID NO: 18969 - RNA, 170 nt, Citrobacter amalonaticus
  source 1..170: mol_type = other RNA; note = Related to NZ_LT556085.1
gatatgttcatgttggtagtggcgttcacgagagcatgtatcatgctcatttgtgaaggtcgcggacagaatgggcgcctgcaaatcagcagtcgttccttcgaaacgtctgctgattcgcaggcgtcatcaacgaaagttttcatcagctttgcttaaggattgaccta

SEQ ID NO: 18970 - RNA, 170 nt, Raoultella planticola
  source 1..170: mol_type = other RNA; note = Related to AP022438.1
ggtaaatttcagttggtagtggcgttcacgagagcatgtatcatgctcatttgtgaaggtcgcggacagaatgggcgcctgcaaatcagcagacgttccttcgaaacgtctgctgattcgcaggcgtcatcaacgaaagttttcatcagctttgcttaaggattgaccta

SEQ ID NO: 18971 - RNA, 170 nt, Salmonella enterica
  source 1..170: mol_type = other RNA; note = Related to AAIGLR010000001.1
ggtatattcgcgttggtagtggcgttcacgagagtatgcatcatgctcatttgtgaaggtcgcggacagaatgtgcgcctgcgaatcagcagtcgttccttcgaaacgtctgctgattcgcaggcgtcatcaacgaaagttttcatcagctttgcttaaggattgacctt

SEQ ID NO: 18972 - RNA, 173 nt, Musicola paradisiaca
  source 1..173: mol_type = other RNA; note = Related to NZ_CM001857.1
gatatttttacttcggtagtggcgttcacgagagtgtgtatcatgctcatttgtgaaggtcgcgtacagaatgtgcgcctgtgaatcagcaggcgttccttcgaaacgcctgctgattcacaggcgtcatcaacgaaagttttcatcagctttgctaaggaatgaccttatga

SEQ ID NO: 18973 - RNA, 173 nt, Pantoea agglomerans
  source 1..173: mol_type = other RNA; note = Related to JABLUT010000044.1
gttatttttaaatcggtagtggcgttcacgagagtgtgtatcatgctcatttgtgaaggtcgcgtacagaatgtgcgcctgcaaatcagcaggcgttccttcgaaacgcctgctgattcacaggcgtcatcaacgaaagcttccatcagctttgctaaggaaagaccttatga

SEQ ID NO: 18974 - RNA, 170 nt, Morganella morganii
  source 1..170: mol_type = other RNA; note = Related to JAAQVS010000001.1
gatagtctaagagaggtagtggcgttcacgagagtatggatcatactcatttgtgaaggtcacgcacagaatgggcgcctgcaaatcagtaggcgttccttcgaaacgtctactgattcgcaggcgtcatcaacgaaagttttcatcgactttgcttaaggaatgaccta

SEQ ID NO: 18975 - RNA, 169 nt, Klebsiella sp.
  source 1..169: mol_type = other RNA; note = Related to NZ_CP082360.1
gttatttttaacgttggtagtggcgttcacgagggtgtgtatcatacccatttgtgaaggtcgcgtacagaatgtgcgcctgtgaagcagcaggcgctccttcgaaacgcctgctgcttcacaggcgtcatcaacgaaagcctcatcagctttgcttaaggactgacct

SEQ ID NO: 18976 - RNA, 170 nt, Enterobacter asburiae
  source 1..170: mol_type = other RNA; note = Related to NZ_KN549084.1
ggtaatttactgtcggtagtggcgttcgcgagagtgtgtatcacactcatttgcgaaggtcgcggaaagaatgggcgcctgagaagcagcaggcgttccttcgaaacgcctgctgcttctcaggcgtcatcaacgaaagttttcatcagctttgctaaaggatggacctt

SEQ ID NO: 18977 - RNA, 183 nt, Yersinia intermedia
  source 1..183: mol_type = other RNA; note = Related to NZ_CP009801.1
taaagtccttatcggtggtggcggaatcacgagagtatgtatcatgctcatttgtgaagatcatgcacagaagggcgcctgcacacaggcagacgctccttcgaatcgtctgcctgtgtgcaggcggcatcaacgaaagctatcagctttgctaaaggtagatctatgagaacgccaccacca

SEQ ID NO: 18978 - RNA, 178 nt, Comamonas kerstersii
  source 1..178: mol_type = other RNA; note = Related to DOQQ01000002.1
tagatttgtcctcggtgatagcgcctaggtgtgggcatgtatcatgcccgtttgctaagaccatcgacagaaggatgcctgccgcaaggcgggtgctccttcgaatcacccgccttgcggcaggcttcatttacgaaggcttttttgctttgctttatcgatgaaggcactatcacca

SEQ ID NO: 18979 - RNA, 180 nt, Serratia marcescens
  source 1..180: mol_type = other RNA; note = Related to FCLB01000008.1
aactatatgcggtggtggtgaagtcgcgagagtgtgtatcacgctcattagcgaagatcatccatagaagggcgcctgtacgcaggcagacgctccttcgaatcgtctgcctgcgtacaggcggcatcaacgaaagcgatcagctttgctaaaggtagatctatgaaaacttcaccacca

SEQ ID NO: 18980 - RNA, 175 nt, Pseudomonas alcaligenes
  source 1..175: mol_type = other RNA; note = Related to FTMP01000014.1
ggtaggtttcgctcggtggtggcgtcgcgagggcgtgtatcatgcccatcagcgaagaccatgcacagaagggcgcctgcgaaaaggcagcgcctccttcggattcgctgcctttccgcaggcggcaacaacgaaagccaagacagctttgcttgtatgggaacgccaccaccac

SEQ ID NO: 18981 - RNA, 180 nt, Idiomarina loihiensis
  source 1..180: mol_type = other RNA; note = Related to DMTT01000123.1
tagatttggcttgtagttctgctttccgtgagggtgtgcatcatgccctttagttatagtccagcgcaagaaggtgcgcctgcattcctgcagagcctccttcgaagtccctgcaggaatgcaggcggcatatacgaaagtttacctttgctcgggagttggatttgaaagcagaactac

SEQ ID NO: 18982 - RNA, 178 nt, unidentified
  source 1..178: mol_type = other RNA; note = Related to JAIENL010000062.1; note = Burkholderiaceae bacterium
taaattcagcttcggtggtagtgccagcgcgagggcgtgcatcacgcccattagcgaagactatgtacagaaggaagcctgccgaaaggcgggcgctccttcgaatcacccgcctttcggcaggcttcatcaacgaaggctctttagccttgcttttgcagtgaaggcgctaccacca

SEQ ID NO: 18983 - RNA, 178 nt, Hydrogenophaga crassostreae
  source 1..178: mol_type = other RNA; note = Related to NZ_CP017476.1
tagatttgtcatcggtggtggcaccatcgcgcgagtgtgtatcacactcatcagcgaagaccatcgacagaaagaagcctgccgaaaggcgggcgctccttcgaatcacccgcctttcggcaggcttcatttacgaaggctactcagccttgctcttccggtgaaggcgccaccacca

SEQ ID NO: 18984 - RNA, 181 nt, Reyranella sp.
  source 1..181: mol_type = other RNA; note = Related to JAGNNA010000003.1
ggtagcgtttctatggtggtggtgtcatcgcgagggtgtgtatcatgcccattagcgaagactagccttagaaggaacgccggctgagtggccgtcgctccttcgaatcgacgcccactcagccggcgttcacaacgaaagctctaacagctttgctgctcccgtgaaggcaccaccacta

SEQ ID NO: 18985 - RNA, 180 nt, Chromobacterium subtsugae
  source 1..180: mol_type = other RNA; note = Related to NZ_JYKA01000004.1
gatagaatccttacgtggtggtgtagtcgtgtgggtgtgtatcatgcccatgagtgacgaccgggcacagaagtgcagcctgtctaacggcagctgctccttcgaatcagctgccgttagacaggctacattgacgaaagtatctttttagactttgctaccttgaacacaccaccactc

SEQ ID NO: 18986 - RNA, 175 nt, Paraburkholderia tropica
  source 1..175: mol_type = other RNA; note = Related to RQIZ01000001.1
gatatactgcgtccggcggtgtgttccgcgtgagtgcgtatcgcgctcgaatgcgaaggccgaggacagaagggagcctgccgaacgacggccgatccttcgaatcgtccgccgttcggcaggcgtcacaacgaaagccatcacagctttgctcttcccgtgaacacaccgcccc

SEQ ID NO: 18987 - RNA, 175 nt, Burkholderia sp.
  source 1..175: mol_type = other RNA; note = Related to NZ_JJMR01000016.1
gatacaatcggaccggtggcgtgtttcgcgtgagtgcgtatcgcactcgtatgcgaaggccgtatatagaagggggcctgccgaagggcggccgctccttcgaatcgtccgcccttcggcaggcggctcaacgaaagcaatctcagctttgctcttcccgtgaacacgccaccac

SEQ ID NO: 18988 - RNA, 175 nt, Burkholderia oklahomensis
  source 1..175: mol_type = other RNA; note = Related to JAEDZZ010000001.1
gatatactcgccccggtggcgtgtttcgcgagagtgcgtatcgcgctcatttgcgaagaccatggacagaagggtgcctgccgaacggcggccgctccctcggatcgtccgccgttcggcaggcgactcaacgaaagcaatctcagctttgctcttcccgtgaacacgccaccac

SEQ ID NO: 18989 - RNA, 147 nt, Thiocapsa rosea
  source 1..147: mol_type = other RNA; note = Related to NZ_RBXL01000001.1
ggaaggtaaaaacttgcgatggggcgcaacgccccagcttgcaaaggtctggtacagaaggttcggtcgggttcgcaccgaagatgcttcgcatcttcggcacgaacccgaccggcgctcaacgaaagcgatctgcgctttgcttta

SEQ ID NO: 18990 - RNA, 147 nt, Luteolibacter ambystomatis
  source 1..147: mol_type = other RNA; note = Related to NZ_CP073100.1
gcgcatctctctactgcgagagggtgcatcatcctcattagcagaggtctacgacagaagggccggcggccatgcggcgaccgccccttcggttcggatcgccgcatggccgccggatctcaacggaagttctcaacacttcgcttt

SEQ ID NO: 18991 - RNA, 180 nt, Marinobacterium profundum
  source 1..180: mol_type = other RNA; note = Related to NZ_BCNS01000018.1
tgtggccgggagtggtggaaaaagatcacgcaggtgtgcatcatgcctattagtgaaggcttaccacagaagggccggcagtctattggcctccgccccttcgggacgtcagccaatagactgccgtcatcaacgaaagtcaaccgactttgctataattaagctatgaatattccacca

SEQ ID NO: 18992 - RNA, 175 nt, Burkholderia anthina
  source 1..175: mol_type = other RNA; note = Related to CABVLY010000035.1
gatagactacgcacggcggtgtgttgcgcgagagtgtgcatcacactcacatgcgaagacccttcgacagaaggacgcctgccgaacggcgggcgatccttcgaatcgcccgccgttcggcaggcggcgtcaacgaaagcaaccagctttgctcttcccgtgaacacaccgccac

SEQ ID NO: 18993 - RNA, 175 nt, Ralstonia solanacearum
  source 1..175: mol_type = other RNA; note = Related to NZ_CP034197.1
gatagactgccgacagcggtgtgttgcgcgagagtgtgcatcacactcatttgcgaagaccgcacgatagaaggacgcctgacgaacggcggacgatccttcgaatcgcccgccgttcgtcaggcggcggcaacgaaagcaaccagctttgctcttcccgtggacacaccgctac

SEQ ID NO: 18994 - RNA, 172 nt, Azotobacter beijerinckii
  source 1..172: mol_type = other RNA; note = Related to FNYO01000057.1
agtaccctgagtgagtgggagcctcaggcgagggtgtgtatcatgcccatctgccaagatcctgcaaagaagggcaccggtcacatggccggcactccttcggagcaccggccatgtgaccggcgcagtacgaaagcaatttaaggctttgctaagtatgaggctcccacac

SEQ ID NO: 18995 - RNA, 172 nt, Pseudomonas oleovorans
  source 1..172: mol_type = other RNA; note = Related to PTLV01000220.1
aggatcctattgttgtgggagcctcaggcgcgggtgtgtatcatgcccaattgccaagatccaccatagaagagctccggccagcgagccggcacgccttcggcgcaccagctcgctggccggcgctttacgaaagcaatttaaggctttgctaagtatgaggctcccacaa

SEQ ID NO: 18996 - RNA, 173 nt, Azotobacter beijerinckii
  source 1..173: mol_type = other RNA; note = Related to NZ_FOFJ01000068.1
cgtaatctagtgtcgtgggagcctcaggcgagggtgtgtatcatgcccgttctgccaagacccaccaaagaagggcaccgtggaggcacacggcgctccttcgaagcaccgcgtacctccacggtgcaatgcgaaagcaacttgaggctttgcttagtatgaggctcccaccc

SEQ ID NO: 18997 - RNA, 167 nt, Massilia horti
  source 1..167: mol_type = other RNA; note = Related to NZ_SPUM01000038.1
tgtaatattcgagcgtgggagcctcgacgagagtgtgtatcacactcatttgtcaagacttatcatagaagggtgccggaaaactctccggcgctccttcgaagcaccgaagatttttccggccccaaaacgaaagttaaaaactttgctaaatgaggctcccactt

SEQ ID NO: 18998 - RNA, 163 nt, Acidocella facilis
  source 1..163: mol_type = other RNA; note = Related to NZ_JAGIXE010000037.1
gtaacttggtgtccgtggggcctcaggcgagggcgtgcagcacgcccattgcgccaagactaatgacagaaggatgccgtcgtttgggcggtgttccttcgaaacacagcccaaacgacggcatctcgatgaaagtcaactttgctatatgaggctcccacac

SEQ ID NO: 18999 - RNA, 166 nt, Rhizorhabdus histidinilytica
  source 1..166: mol_type = other RNA; note = Related to WMBU01000038.1
gataaatgtcgcttgtgggagcttcaggcgagagcgtgcatcacgctcactgcgccaagaccgaggttagaagggatgccggcggtctcgccgacgctccttcgaaccgccgacgagaccgccggcactccatgaaagtgaactttgctatatgaggctcccacaa

SEQ ID NO: 19000 - RNA, 164 nt, Burkholderia cepacia
  source 1..164: mol_type = other RNA; note = Related to NZ_JAIZQS010000002.1
ataaacttcttcgcgcgggagcttcggcgcgggtgtgtatcacacccactcgccaagatcagggacagaaggattccggcgaaatggctggggatccttcgaatccccagccatttcgccggctacactacgaaagctacctttgctaaatgaggctcccgctc

SEQ ID NO: 19001 - RNA, 165 nt, Burkholderia gladioli
  source 1..165: mol_type = other RNA; note = Related to NZ_CADFBE010000001.1
gataaactgcccctcgcgggagcttcggcgcgggcgtgtatcacgcccactcgccaagatcagggacagaaggattccggcgaaatggctggggatccttcgaatccccagccatttcgccggctacacaacgaaagctaactttgctaaatgaggctcccgccc

SEQ ID NO: 19002 - RNA, 164 nt, Paraburkholderia sp.
  source 1..164: mol_type = other RNA; note = Related to NZ_CADFGI010000002.1
agtagacttcgcgctgcgggagcttcggcgcgggtatgcatcatacccactcgccaagatcatggacagaaggattccgacgaaatggccggtgatccttcgaatccccgaccatttcgtcggctctaaacgaaagaaaactttgctaaatgaggctcccgcaa

SEQ ID NO: 19003 - RNA, 165 nt, Paraburkholderia domus
  source 1..165: mol_type = other RNA; note = Related to CAJNAS010000001.1
ggtagacttccacgtgcgggagcttcggcgcgggcgtgcatcacgcccactcgccaagatcagggaaagaaggattccgacgaaatggccggtgatccttcgaatccccagccatttcgccggctctacaacgaaagtaacctttgctaaatgaggctcccgcaa

SEQ ID NO: 19004 - RNA, 166 nt, unidentified
  source 1..166: mol_type = other RNA; note = Related to JAAGNS010000286.1; note = Proposed Ferrovum sp.
gtaatctgatgggcgcgggagcctcggcgcgggtgtgtatcatgcccatttgccaagattacgggatagaagggttccggagaaatggccggagatccttcgaatctccggccatttctccggccgccttgcgaaagcattgctttgctaaatgaggctcccgcaa

SEQ ID NO: 19005 - RNA, 165 nt, Pelomonas sp.
  source 1..165: mol_type = other RNA; note = Related to JAJTWT010000001.1
ggtaagcttgtcttgcgggagcctcaggcgagggtatgaatcatgcccgcttgccaagaccttgcatagaaggagccggataaacgcccgcgtctccttcgaagccacagtcgtttatccggctgcaatacgaaagctaagctttgctgaatgaggctcccgcac

SEQ ID NO: 19006 - RNA, 166 nt, Rhodococcus sp.
  source 1..166: mol_type = other RNA; note = Related to MWOL01000027.1
ttaagctgcgttctgcgggagtctcaggcgcgggtgtgcatcatgcccatttgccaagaccacggatagaaggaggcctgagaactggctggggctccttcgaatccccagccagttctcaggccgcattacgaaagctttgctttgctaaatgagactcccgcaa

SEQ ID NO: 19007 - RNA, 172 nt, unidentified
  source 1..172: mol_type = other RNA; note = Related to SSEM01000053.1; note = Desulfurellales bacterium
ctaacctttttgatgcgggagcctcaggcgagggtgtgcatcacactcaggtttgttgccaaggtccgggaaagaagggtcgccgacgaatcggctgcggctccttcgaaaccacagccgattcgtcggcgcttaacgaaagcttttgctttgctatatgaggctcccgcaa

SEQ ID NO: 19008 - RNA, 164 nt, Ideonella sp.
  source 1..164: mol_type = other RNA; note = Related to PTEU01000002.1
gataatcttgctgtgcgggagtctcggcgcgggtgtgaatcatgcccattcgccaagatcacggatagaagggatccggcgaactggctgcggctccttcgaatccgcagccagttcgccggctccaaaacgaaagttgactttgctaaatgaggctcccgcac

SEQ ID NO: 19009 - RNA, 167 nt, Undibacterium parvum
  source 1..167: mol_type = other RNA; note = Related to CP034464.1
gatacgatagcaacgtgggggtctcggcgagagtgtgtatcatgctcaatttgccaagattatgctttagaagggtgccgtaaaaagattcggtgctccttcgaagccccgaatatttttacggctcctatatgaaagttagactttgctaaatgaggctcccacaa

SEQ ID NO: 19010 - RNA, 167 nt, Xanthomonas arboricola
  source 1..167: mol_type = other RNA; note = Related to MDDY01000002.1
ggtagcctatgcctgcgggagcctcaggcgcgggtgtgcatcatgcccatttgcctaggttcagtagttagaaggtgccggcgaatcagccggcgctccttcgaagcgccgtctgcttcgccggcgcttaacgaaagcatttgctttgctatatgaggctcccgccc

SEQ ID NO: 19011 - RNA, 167 nt, Stenotrophomonas sp.
  source 1..167: mol_type = other RNA; note = Related to NZ_MOYM01000001.1
gatagtctatacaggcgggagcctcaggcgcgggtgtgtatcatgcccaattgcccaggcccggtagttagaagggtgccgtcgaatcagccggcgctccttcgaatcgccgtccgattcgacggcgctcaacgaaagcattgctttgctatatgaggctcccgctc

SEQ ID NO: 19012 - RNA, 164 nt, Luteimonas marina
  source 1..164: mol_type = other RNA; note = Related to NZ_VOHK01000004.1
actaggatgaccttgcgggagcctcaggcgagggtgtgtatcacgcccatcaagccaaggtcgaggatagaaggtgccggcgaagcggccgacgatccttcgaatcgccggccgcttcgccggcgcacaacgaaaaatcattttgctaaatgaggctcccgcac

SEQ ID NO: 19013 - RNA, 166 nt, Agrobacterium sp.
  source 1..166: mol_type = other RNA; note = Related to NZ_KI535289.1
ttaaacagtttgtcgtgggagcttcaggcgagggtgtgcatcatgcccaaatgccaagactggtacatagaagaccgccgtgagcttgactcgcggtccttcgaaccgagagtcaagctcacggcacttaacgaaagatagctttgctaaaatgaggctcccacac

SEQ ID NO: 19014 - RNA, 166 nt, Shinella sp.
  source 1..166: mol_type = other RNA; note = Related to QFOR01000002.1
gttaaacagttgtcgtgggagcttcaggcgagggtgtgcatcatgcccaaatgccaagactggtacatagaagagcgccgtgagcttgactcgcggtccttcgaaccgagagtcaagctcacggcacttaacgaaagatagctttgctaaaatgaggctcccacac

SEQ ID NO: 19015 - RNA, 164 nt, Rhizobium laguerreae
  source 1..164: mol_type = other RNA; note = Related to WIFE01000020.1
aatagaaggatgttgtgggggcttcaggcgcgggtgtgtatcatgcccactagccaagactgtgataagaaggttgccgtaagcacagctcacgctccttcgaatccctcgccgtgcttacggcactcaacgaaagatagctttgctaaatgaagctcccacgc

SEQ ID NO: 19016 - RNA, 164 nt, Methylobacterium sp.
  source 1..164: mol_type = other RNA; note = Related to NZ_LMNG01000030.1
ggtaacgtgatggcgcgggagtctcaggcgcgggtgtgtatcatgcccatttgccaaggttaaacacataaggtcgccgtctaaagcggcggccttccttcgaaagtccaccactttagacggcactctacggaagcttgcttcgctaaatgagactcccgcaa

SEQ ID NO: 19017 - RNA, 164 nt, Phaeobacter inhibens
  source 1..164: mol_type = other RNA; note = Related to NZ_CP010735.1
gtaaggatgaaggtgcggaagcctcaggcgcgggtgtgcatcatgcccatttgccaagactacacacagaagggtcgtcgttcttcggacgaacgctccttcgaagcgcacgtccaaagaacgacgcttatgaaaccaaggtttgctaaatgaggcttccgcaa

SEQ ID NO: 19018 - RNA, 164 nt, Ruegeria pomeroyi
  source 1..164: mol_type = other RNA; note = Related to NC_003911.12
catagtttgtcgttgtggaagcctcaggcgcgggtgtgcatcatgcccatttgccaagactacatacagaagggtcgtcggtcttcgaactggcgctccttcgaagcgccagttcgaagaccgacgctcatgaaacgattgtttgctaaatgaggcttccgcac

SEQ ID NO: 19019 - RNA, 164 nt, Salipiger marinus
  source 1..164: mol_type = other RNA; note = Related to NZ_FNEJ01000006.1
gctataatcacatcgcgggagtctcaggcgcgggtgtgtatcatgcccacttgccaaggctatgtacagaagggtcgtcggtcttcggactgacgctccttcgaatcgtcagtccgaagaccgacgctcatgaaacgattgtttgctaaatgagactcccgcac

SEQ ID NO: 19020 - RNA, 181 nt, unidentified
  source 1..181: mol_type = other RNA; note = Related to JAAFAL010000034.1; note = unidentified bacterium
aatagtgtgtctgggcgggtgcgtgaggactcggcgcgagtgtgcatcacactcactagccaagatcaggcacagaagggttcggctaagttccgccgggctccttcgaatcccggcgaaacttagccgacgccacaatgaaagccactaagctttgctaatgaggactacgcacccgcta

SEQ ID NO: 19021 - RNA, 163 nt, unidentified
  source 1..163: mol_type = other RNA; note = Related to JAIUPC010000007.1; note = Proteobacteria bacterium
ggtagctttgatgcgtgggagtctcaggcgcgggtgtgtatcatgcccatttgccaagactatgcatagaagggcaccggccatgtcgccggagctccttcgaatcaccgtcgacatggccggtgcttgcgaaagagacctttgctaaatgaggctcccacac

SEQ ID NO: 19022 - RNA, 163 nt, Roseomonas sp.
  source 1..163: mol_type = other RNA; note = Related to JADCJU010000004.1
gctagcgttgaaatgtgggagcctcaggcgcgggtgtgcatcatgcccactagccaagactatgaaaagaaggacaccggctctgttgtcggcgctccttcgaatcgccgacaacagagccggcgctcacgaaagcgagctttgctaaatggggctcccacac

SEQ ID NO: 19023 - RNA, 164 nt, Labrenzia sp.
  source 1..164: mol_type = other RNA; note = Related to NZ_CP041191.1
aataattttgacgtgtgagggcctcaggcgcgggtgtgtatcatgcccactagccaagactatacatagaagggttccgaccatgctgtcggcgctccttcgaaccaccaacaacatggtcggacacttatgaaagccagctttgctaaatgaggctctcacac

SEQ ID NO: 19024 - RNA, 163 nt, Niveispirillum lacus
  source 1..163: mol_type = other RNA; note = Related to NOXU01000023.1
cgtaatcatggcatgtgggagtctcaggcgcgagtgtgtatcacgctcaactgccaagatctacgacagaagggccccggccatgtcgccgctgctccttcgaaccaccgccgacatggccggtgctcatgaaagcgagctttgctaaatgaggctcccacac

SEQ ID NO: 19025 - RNA, 184 nt, unidentified
  source 1..184: mol_type = other RNA; note = Related to JADLAT010000006.1; note = Alphaproteobacteria bacterium
gtaatctcggctgcgtgggagtctcgggcgcgagcgtgtatcacgctcaaatgctaagaccaaaaacagaaggattccggtggatgtaccggagctccttcgaacctccggtacatccaccggctctctcgaaagtgacctgttatttattaagagggatctttgctaaatgagactcccacac

SEQ ID NO: 19026 - RNA, 178 nt, unidentified
  source 1..178: mol_type = other RNA; note = Related to JABJKH010000091.1; note = Rhodospirillaceae bacterium
ttaacatgaaaagcgtgggagtctcaggcgcgggcgtgcatcacgctcaactgcctagaccaagaacagaagggcccggcttgtcagtcggtgctccttcgaatcaccgccagacaagccggtgctctcgaaaggtactcttaccgaaaggaacctttgctatatgaggctcccacaa

SEQ ID NO: 19027 - RNA, 164 nt, Roseibium aggregatum
  source 1..164: mol_type = other RNA; note = Related to CP045631.1
cttagttttgtcgtgtgggaacttcgggcgaaggtgtgcatcacacctgcttgccgaggctagacgacagaaggttccgccatcttcgattggcgctccttcagaccgtcaatcgaagatggcggtacttacgaaaggtaactttgctaatgaggttcccacac

SEQ ID NO: 19028 - RNA, 163 nt, Pseudovibrio sp.
  source 1..163: mol_type = other RNA; note = Related to NZ_FREX01000003.1
actaaggtttactcgtgggagtctcggcgagggtgtgtatcatgcccatttgctaagaccaaatacagaaggattccgccgaattcaccggcagtccttcgaacttccgatgaattcgtcggctccttacgaaaggttactttgcttaatgagactcccacac

SEQ ID NO: 19029 - RNA, 165 nt, Sulfitobacter pontiacus
  source 1..165: mol_type = other RNA; note = Related to NZ_AXZR01000004.1
agtacatgtaaactgtggaaacctcaggcgcgggtgtgcatcatgcccttatgccaagaccagaacttagaaggacccgccatatctatttggcgctccttcgaaacgccaaatagatatggcggtactcttgaaaggttactttgctaaatgaggtttccacac

SEQ ID NO: 19030 - RNA, 161 nt, unidentified
  source 1..161: mol_type = other RNA; note = Related to NVXB01000069.1; note = Hyphomicrobiales bacterium
tatagacttgtattgtggaggtttcgacgagagtgtgcatcatgctcatttgttatgactaatcacagaagggtccgccatcttcggcgatgatccttcgaatcctcaccgaagattgcggtgcttttgaaagttgactttgctaaatgaaacctccacac

SEQ ID NO: 19031 - RNA, 179 nt, unidentified
  source 1..179: mol_type = other RNA; note = Related to RPGP01000001.1; note = Desulfobacteraceae bacterium Eth-SRB1
gaggaaaaaaaggaatcggttggcgcttcgccaacctcagatggtagcagtactttacaagattttgcgcggccaataaaatcggccgccgcacctcggtaccctcggcacaacggccgattttattggtcgcggatctcaaagcaactgaattttcaagttggtcttaatttttcctc

SEQ ID NO: 19032 - RNA, 180 nt, unidentified
  source 1..180: mol_type = other RNA; note = Related to JACQWO010000092.1; note = Desulfobacterales bacterium
gtacgagaacaggattcggttggcgattcgccatccacggaaggtagcataattttacaagagggtgcgtggccaataaaaccggccgctgctcctcgggttcctcggaccaccggccgattttattggccacggatctcaaagcaactaagtattgaagttggccctagtttttcgtcc

SEQ ID NO: 19033 - RNA, 161 nt, unidentified
  source 1..161: mol_type = other RNA; note = Related to JAHJDK010000078.1; note = Nanoarchaeota archaeon
gagcaaataaaggagttggttggcgattcgccaactgtgataggtagtagggaaatatacaagaggcatcggccaataattgcggccttgccatgcttcggccgaaattattggccgatgctcttaggacagcttttagctgaccctttgaagaacggctc

SEQ ID NO: 19034 - RNA, 178 nt, unidentified
  source 1..178: mol_type = other RNA; note = Related to JACXUH010000041.1; note = Betaproteobacteria bacterium
aagcgcatcaggaattggctggtgattcgccagccgtaaacagtagcggtaatacacaagagggcacgtggccaataagttcggccagtgaccctcgagtacctcgggtccctgtccgaacttattggccacgggtcgtaaggcaacttgatttcaaggttggttctgtaccgcgctc

SEQ ID NO: 19035 - RNA, 187 nt, Marinobacter sp.
  source 1..187: mol_type = other RNA; note = Related to NZ_KB822693.1
taatggatcaagatttggatggcgcttcgccatcttcagaaattagttcaacattacaagagggctcgcgaccagtaggttctggttcgaagccttcgcggacggagccgactcgtcttcgaaccagaacctactggtcgcgggtctcagagcaacttagtgttcaggttggccttgatttccattc

SEQ ID NO: 19036 - RNA, 188 nt, Nitrosomonas sp.
  source 1..188: mol_type = other RNA; note = Related to SSFV01000001.1
gtagcgaaacaggatttggatggcgattcgccatcttcagaaagtagcacaatttcacaagaaggcacgcggccagtaaattctggctctgcgccttcgcgactaacgtcgacttgtcacagcaccagaatttactggccgcgagtcgttgagcaactgaattctaaagttggccttggttcccaaac

SEQ ID NO: 19037 - RNA, 184 nt, unidentified
  source 1..184: mol_type = other RNA; note = Related to PALV01000013.1; note = Gammaproteobacteria bacterium
atgtggctcaagattcggatggtgattcgccatcttcagaagctagtagtgcattacaagagggctcgcggccagtaaattctggctctgagccttcgcgaacggagtcgactcgtctcagagccagaatttactggccgcgggtctcagagcaacttctctcagttggtcttgatcgtcacac

SEQ ID NO: 19038 - RNA, 161 nt, Desulfovibrio sp.
  source 1..161: mol_type = other RNA; note = Related to ATHV01000015.1
gagcgaggcttggaattgactggcgattcgccagtcgtggagactagatatgttttacaaggtcgacggccaatagcaccggccgccggccccggcgtccggcgctattggccgtcgactttcaagcagctaaaaggttttgctggtccaaagcctcgctc

SEQ ID NO: 19039 - RNA, 161 nt, Halodesulfovibrio sp.
  source 1..161: mol_type = other RNA; note = Related to WYDS01000022.1
catttagatctggatgcggatggtgcttcgccatccgataaaagaagtttcaagatacaagtgcccagaccaataaaaccgcttggtctcgcgcccgcacaattttattggtctggggcatacaggcagcttacatctacagctggtccaaattccactct

SEQ ID NO: 19040 - RNA, 161 nt, Desulfovibrio sp.
  source 1..161: mol_type = other RNA; note = Related to MLBG01000117.1
gggcggggattggagttgactggtgattcgccagtcatggacttgagttcagacaaacaaagtcgacgaccaataggccaggtcgtcgattccgccgatctggcctattggtcgtcgactttcaagcagctaaagcattcagctggtccactcccccgctc

SEQ ID NO: 19041 - RNA, 164 nt, Brevundimonas naejangsanensis
  source 1..164: mol_type = other RNA; note = Related to CP038027.1
ggggaggcatcaaggttggtcggcgcttcgccgactttagacactagctcacccataaaaggaagcgtggccaataagtacggccaccacgttcctcctggccgtacttattggccacgcatctcaaggcagtttggcgtatcaactggcttgtccgcctcctc

SEQ ID NO: 19042 - RNA, 164 nt, unidentified
  source 1..164: mol_type = other RNA; note = Related to JAFLCS010000004.1; note = Caulobacterales bacterium
ggaggagcaacaaggttggtcggcgatgcgccgactttagaatctagctcaagcataaaaggatgcgcggccaataacttcggccacagcgttcctcgtgtccgaacttattggccacgcatttcaaggcagttcgatagatcaactggcttgtccgctccttc

SEQ ID NO: 19043 - RNA, 179 nt, Pseudolabrys taiwanensis
  source 1..179: mol_type = other RNA; note = Related to NZ_CP031417.1
gagctcggtacggaattggctggtgtttcaccagcttcggataccagcactatcgtaaaaggacgcgcggccaataaccttggccgttcgtccttcggacgccgcttcgctaacggccaagcttattggccgcgcattcaagggcagttcattactcgaactggtccaacccggcgctc

SEQ ID NO: 19044 - RNA, 137 nt, Pelagibius marinus
  source 1..137: mol_type = other RNA; note = Related to NZ_JACSDK010000013.1
gcgaaggggagtcgggcggcgcttcgccgccttcaaacctaaggtctctcatcgattcactcggccgaccccttgggtcgaccgaggacgatggcaaccaaccgcccacgcgggcgtggccggttgctcgccatcgt

SEQ ID NO: 19045 - RNA, 164 nt, Methylorubrum sp.
  source 1..164: mol_type = other RNA; note = Related to SRHQ01000067.1
gaacagacaacggagtcgggcggcgtttcaccgcccttgttacaaagaacgaccttagaaggtaccggggccaatgagtgcggcccctcggttcctcggggccgcacccattggccccggtactcaaagcagttgactaaaacaactggttcgtcgtcctcctc

SEQ ID NO: 19046 - RNA, 151 nt, unidentified
  source 1..151: mol_type = other RNA; note = Related to VXOZ01000123.1; note = Chloroflexi bacterium
gttcaggcaacggaattgggcggcgcttcgccgtctgaggatgccagttcaacttcacaagggggctcggccaacaagagccggcccctcgttcctcggggtttggcttgttggcctcgcctctctaaggaattgcttattcgcccttcgc

SEQ ID NO: 19047 - RNA, 161 nt, unidentified
  source 1..161: mol_type = other RNA; note = Related to SSDV01000007.1; note = Sphingomonadales bacterium
gtcaaagcaacgggattggacggcgctgcgccgtctgcagatgtaagaccctcaaaaaaaggacccgaggccaataagcttggccccgtcgttcctagtggccaagcttattggcctcggttctctaggcagttatccgaacagactggctctttgccgac

SEQ ID NO: 19048 - RNA, 177 nt, Burkholderia gladioli
  source 1..177: mol_type = other RNA; note = Related to NZ_LAVN01000001.1
ccccatacgcagaagtcggtcgatgtttcgtcgaccagtcgtactagcggtggtgaagacatacaagaggttccgcggccaacgaaaagttttggtcgcggcgagcgcgcccaagaacgttttccttggccgcggatctttgagcagataagtgatggatctggttctgctacggga

SEQ ID NO: 19049 - RNA, 179 nt, Duganella sp.
  source 1..179: mol_type = other RNA; note = Related to QVIO01000003.1
gcgccagtcatgcagaagtcggtcgatgtttcgtcgaccatgcaaaacagtggtgagtacgtacaagaagttccgcggccaacgaaaagttgtaaccgcggcgagcgcggtcacgaacgttttcgttggccgcggatctacgagcagatgactaaaggatctggttctgctaacggtgc

SEQ ID NO: 19050 - RNA, 151 nt, Geobacter sp.
  source 1..151: mol_type = other RNA; note = Related to VMKF01000002.1
gatcggcaacagatgggtggcgcttcgccatctggaagtgaaaaaattttgttaaaagaggttgcgcggccaattcgtacgaccgcgttgccacacggccgtacgaattggccgcgcatcggtaagcaattcctgcatagaaacgttgagc

SEQ ID NO: 19051 - RNA, 175 nt, Nitrosospira multiformis
  source 1..175: mol_type = other RNA; note = Related to FNKY01000001.1
aattgggaaaagaagaattgactgatgcttcgtcagtctctttaattgaccttgttatacaagaagaggagcggccaataaacccggccgtaactcttggtaaagctcagagtgacggccgggtttattggccgcttctcgctaagcaactttttgttggctctattcctcaatc

SEQ ID NO: 19052 - RNA, 172 nt, Janthinobacterium lividum
  source 1..172: mol_type = other RNA; note = Related to NZ_JAAOLY010000027.1
aagcgaaatcagagttggctgatgtttcgtcagctagtttaaatgacctcgtttcacaagaagagcagcggccaataagcgcgctcactcctcttcgctccactcatcgtcgcgagcccgcttattggccgcttctcggaaagcaacttctcgttggctctacagttcgctc

SEQ ID NO: 19053 - RNA, 168 nt, unidentified
  source 1..168: mol_type = other RNA; note = Related to PQGD01000012.1; note = Proposed Superficieibacter electus
actgatacagagaatatgggcggtgattcgccgtctttacagttaaggcacaatttaaaagaggttccgcacccaagcctgtcttgggctgcagggaccctgcccagcagcccaagacaggcttgggtgcggatctacgagcaattaaatattggttcgatgtccagt

SEQ ID NO: 19054 - RNA, 168 nt, Serratia marcescens
  source 1..168: mol_type = other RNA; note = Related to DACSPQ010000008.1
actgatacagagaatatggacggtgattcgccgtctttacagttaaggcacaattcaaaagaggttccgcacccaagcctgccttgggctgcaggggccctacccagcagcccaaggcaggcttgggtgcggatctacgagcaattaaaaattggttcgatgtccagt

SEQ ID NO: 19055 - RNA, 168 nt, Klebsiella oxytoca
  source 1..168: mol_type = other RNA; note = Related to LS483483.1
actgagtcaaagaaaatgggcggtgcttcgccgtcttcacagttaaggtttgttttaaaagatgctccgcacccaagtgttccttgggcgctcggggccctacccaatcacccaaggaacacttgggtgcggatcgctgagcaaattaattttggttcgatgcttagt

SEQ ID NO: 19056 - RNA, 144 nt, Escherichia coli
  source 1..144: mol_type = other RNA; note = Related to MOFU01000029.1
actgagtcaaagaaaatgggcggtgcttcgccgtctttacagttaaggtttgttttaaaagaggttccgcacccaagtgttccttgnncaaggaacacttgggtgcggatcgctgagcaaattaattttggttcgatgcttggt

SEQ ID NO: 19057 - RNA, 168 nt, Klebsiella pneumoniae
  source 1..168: mol_type = other RNA; note = Related to AP021929.1
actgaaacagagaaaatgagcggcgattcgccgttcttaacgttaaggcacattttaaaagaggttccgcacccaagcctgccttgggcgaccgggaccctgcccagccgcccaaggcaggcttgggtgcggatctatgagcaattaaagattggttcgacgttcggt

SEQ ID NO: 19058 - RNA, 172 nt, Serratia ureilytica
  source 1..172: mol_type = other RNA; note = Related to NZ_JADTXJ010000009.1
ctactgaaacaaagaatatgggcggcgaaccgccgtctttacagttaaggccttacataaaagaggttccgcacccaagcctgtcttgggcgtctgggaccttgcccagtcgcccaagacaggcttgggtgcggatctttgagcaattacgaattggttcaatgtccagtag

SEQ ID NO: 19059 - RNA, 171 nt, Enterobacter cancerogenus
  source 1..171: mol_type = other RNA; note = Related to NZ_CP045769.1
actgatacaaagaatatgggcggcgaatcgccgtctttgcagttaaggccatacataaaagaggttccgcacccaagcctgtcttgggcgtccgggaccttgcccagtcgcccaagacaggcttgggtgcggatctttgagcaattacgaattggttcaatgtccagtagt

SEQ ID NO: 19060 - RNA, 171 nt, Enterobacter sp.
  source 1..171: mol_type = other RNA; note = Related to NZ_CP087390.1
actgatacaaagaatatggacggcgcaccgccgtctttgcagttaaggccttacataaaagaggttccgcacccaagcctgtcttgggcgtccgggaccttgcccagccgcccaagacaggcttgggtgcggatctttgagcaattacgaattggttcaatgtccagtagt

SEQ ID NO: 19061 - RNA, 171 nt, Escherichia coli
  source 1..171: mol_type = other RNA; note = Related to NZ_NRWV01000070.1
actgatacaaagaatacgggcggtgaatcgccgtctttacagttaaggccttacataaaagaggttccgcacccaagcctgccttgggcgtccgggaccttgcccagccgcccaaggcaggcttgggtgcggatctttgagcaattacgaattggttcaatgtccagtagt

SEQ ID NO: 19062 - RNA, 171 nt, Pantoea sp.
  source 1..171: mol_type = other RNA; note = Related to JACVBT010000006.1
actgatacaaagaatatgggcggcgattcgccgtctttacagttaaggcatgatttaaaagaggttccgcacccaggcctgtcttgggcgtccgggaccttgcccagccgcccaagacaggcctgggtgcggatctttgagcaattacaaattggttcaatgtccagtagt

SEQ ID NO: 19063 - RNA, 170 nt, Aeromonas sp.
  source 1..170: mol_type = other RNA; note = Related to NZ_CP038513.1
tcccctgaacagaataaggctagcgtttcgtcagccactatgtttaggtctactgtaaaagtagctccgtggccagaaaactctctggtctcggggcccctcccccaaaaccagagagttttctggccacgggtctcagagcaattaagaattggttctaatgcaggggg

SEQ ID NO: 19064 - RNA, 170 nt, Aeromonas veronii
  source 1..170: mol_type = other RNA; note = Related to NZ_CP033604.1
tcccctgaacagaatatggttagcgcttcgtcaaccattacgtttaggtctacgttaaaagtagctccgtggccagaaaactctctggtctcggggcccctcccccaaaaccagagagttttctggccacgggtctcagagcaattaaaaattggttctaactcggggga

SEQ ID NO: 19065 - RNA, 170 nt, Vibrio panuliri
  source 1..170: mol_type = other RNA; note = Related to NZ_AP019654.1
tctcctgaacaggatgtggctggtgtatcaccacccaaagtgtttaggtcaagtttaaaagcagctccgtggccagaaaactctctgtccccaggggccctcccccaaacccagagagttttctggccacgggtctcagagcaattacagattggttctatctcagggga

SEQ ID NO: 19066 - RNA, 170 nt, unidentified
  source 1..170: mol_type = other RNA; note = Related to PIZK01000029.1; note = Alteromonadales bacterium alter-6D02
gcttctgaaagaaattcgggtggtgcatcaccacttaaacaagcaagctcaagcacaaaagtatcccctaggccagaaatttctctgtccccggggccccaaccccaaatccagagaaatttatggcctagggtatatttgcaattaaatattggttcaaaaccagaagc

SEQ ID NO: 19067 - RNA, 170 nt, Alteromonas macleodii
  source 1..170: mol_type = other RNA; note = Related to MBSN01000054.1
gcttctgaaagaaatacgggtggtgcatcaccacttaagcaagcaagatcaagcacaaaagtatcccctaggccagaaattcctctgccctcggggccccttccccaaaaccagaggaatttctggcctagggtatattggcaattaaatattggttcaaaaccagaagc

SEQ ID NO: 19068 - RNA, 170 nt, Paraglaciecola hydrolytica
  source 1..170: mol_type = other RNA; note = Related to NZ_LSNE01000017.1
gcttctgaaagaaatatgggtggtgtatcaccacctggaagattaaggtccagcacaaaagtatcccctaggccagaagttcctctgtccctggggccccttccccaaaaccagaggaacttctggcctagggtatatcagcaattaggtattggttcaaaaacggaagc

SEQ ID NO: 19069 - RNA, 170 nt, Vibrio parahaemolyticus
  source 1..170: mol_type = other RNA; note = Related to NZ_MISS01000101.1
tctcctgaacagaaaatggatggtgtaccaccatcttctatgtttaggttatctttaaaagatgctccgaggccagaagaatctctgtcctcggggcccctaccccaaagccagagattcttctggcctcgggtctcagagcaattacaaattggttctaattcagggga

SEQ ID NO: 19070 - RNA, 170 nt, Vibrio crassostreae
  source 1..170: mol_type = other RNA; note = Related to VIVA01000006.1
ttccctgtgcaagaaatggttggtgtatcaccatccgaaacgcaaaggttatctttaaaagcagctccgaggccagaagaatctctgtccccggggcccctaccccaaaaccagagattcttctggcctcgggtctcagagcaattaaaaattggttctacttcaggaaa

SEQ ID NO: 19071 - RNA, 170 nt, Vibrio parahaemolyticus
  source 1..170: mol_type = other RNA; note = Related to JACBTA010000009.1
cttttcgaacagaatttggatggtgattcgccatctcctatgttcaggtcaacatcaaaagtagctccgaggccagaagaatctctgtccccggggcccctaccccaaaaccagagattcttctggcctcgggtctcagagcaattgaaaattggttctttctcggaagg

SEQ ID NO: 19072 - RNA, 170 nt, Aeromonas media
  source 1..170: mol_type = other RNA; note = Related to CP038441.1
tcgccgacagggaatctggctggtgcagcaccagttgttaggaacagttcggctttaaaagcagctccgcggccagaagtttctctagcctcggggccccttccccaaaaccagagaaacttctggccgcgggtctctgagcaatttaatattggtcttattgtcggtga

SEQ ID NO: 19073 - RNA, 152 nt, Marinibactrum sp.
  source 1..152: mol_type = other RNA; note = Related to JAJSLX010000004.1
gtgctagatcagaatttggatgatgcttcgtcatcctctagtataggacttaaatatcaagatgcacagcggtcaaatagctttttggccgctgaccaaaaagctatttggccgctggtctcagagcaatttcagattggttctactagcgc

SEQ ID NO: 19074 - RNA, 170 nt, unidentified
  source 1..170: mol_type = other RNA; note = Related to QBMB01000082.1; note = Burkholderiales bacterium
gctgaggaaccagagaaggctgatgattcgtcagccgtagcaattgattcagcaacacaaggggagcggccaaaaggcgcggccgccaatcctcgcgcagctccgggtgtcggccgcgccttttggccgctcctctctaagcaactttttgttggctcttcccctcaagc

SEQ ID NO: 19075 - RNA, 170 nt, Hydrogenophaga sp.
  source 1..170: mol_type = other RNA; note = Related to NZ_SCML01000017.1
gctgaggaaccagagaaggctgatgtttcgtcagccgtatttattgactcagcgacacaagaggagcggccaaaaggcgcggccgccaatcctcgcgtagctccgggtgccggccgcgccttttggccgctcctagctaagcaactttttgttggctcttccccttcagc

SEQ ID NO: 19076 - RNA, 167 nt, unidentified
  source 1..167: mol_type = other RNA; note = Related to JAFLDL010000015.1; note = Candidatus Accumulibacter sp.
gtttggggtatcgagcaggctgatgattcgtcggccgtatcccatggaatggcagtgcaagaggacgagcggccaataggcgcggccgtctctcctcgtaggagagacggccgcgcctattggccgctcctctcaaagcagcttttagttggctcttcttccccctc

SEQ ID NO: 19077 - RNA, 173 nt, unidentified
  source 1..173: mol_type = other RNA; note = Related to PBZA01000066.1; note = Sutterellaceae bacterium
gttcaggaaacagagaaggctgatgcatcgtcagccgtagtgattgaaccagtattacaagaggataagcggccaatatccccggccgtccctcctcgcccagctcggagttccggccgtggatattggccgctcctctcaaagcaactttttgttggctcttctaccctgac

SEQ ID NO: 19078 - RNA, 173 nt, Pseudomonas stutzeri
  source 1..173: mol_type = other RNA; note = Related to NZ_AJXE01000028.1
gccggtgaaccagagaaggctgatgtttcgtcagccgtaattgttgaccaaccagtacaagaggatgagcggccaacaggcgcggcccgccctcctcgcgtagctcgtcgtgcggcccgcgcctgttggccgctcctcgcaaagcaactttttgttggctcttcctcccgcgc

SEQ ID NO: 19079 - RNA, 173 nt, Pseudomonas sp.
  source 1..173: mol_type = other RNA; note = Related to JAAQXA010000034.1
gccggtgaaccagagaaggctgatgtttcgtcagccgtaattgttgacccaccactacaagaggatgagcggccaacaggcgcggcccgccctcctcgcgtagctcgtcgagcgggccgcgcctgttggccgcccctcggtaagcaactttttgttggctcttcctcccgcgc

SEQ ID NO: 19080 - RNA, 173 nt, Pseudomonas izuensis
  source 1..173: mol_type = other RNA; note = Related to NZ_WTFT01000007.1
gccggtgaatcagagaaggctgatgtttcgtcagccgtaattgttgaccaaccactacaagaggatgagcggccaacaggcgcggtctgccctcctcgcgtagctcgtcgagcagaccgcgcctgttggccgcttctcgcaaagcaactttttgttggctcttcctcccgcgc

SEQ ID NO: 19081 - RNA, 165 nt, unidentified
  source 1..165: mol_type = other RNA; note = Related to DNJA01000297.1; note = Deltaproteobacteria bacterium
agattagtggttagtaacgactctaataggttggcgcttcgccatcctttcgtgcattcttgaaaagaaaggtgcgcgggaaagccggtcggctcccgcgcgccgccgggtccgcccggctttcccgcgcagcatctacgtaaggaaacgaattccttagccatg

SEQ ID NO: 19082 - RNA, 195 nt, Granulicella mallensis
  source 1..195: mol_type = other RNA; note = Related to NC_016631.1
agacaggtggcgtggttgtttcactttggttgatgtttcgtcaaccgatgtagcaatcaggtaattcatacaagggttgtcaacacgacgacttgcaaaagacaaaaccgcaactcgtcgtgttgacaacacagtcgagcagtgtcaacacactggaatccgaagtgatcacgccgcttgtctctttcacatctt

SEQ ID NO: 19083 - RNA, 187 nt, Dehalogenimonas sp.
  source 1..187: mol_type = other RNA; note = Related to CP011392.1
agcaaggggagcacgaattatgattgggcgtcgtttcgtcgcccatgtgacaaggctctccataaaatatctcctatttcgagaaataggagatttgcgactcgtcctccgtttgttactacggagcgagcggcaattcacaaggattggacaacatgaatagtctccccttgctggtctccttaga

SEQ ID NO: 19084 - RNA, 153 nt, unidentified
  source 1..153: mol_type = other RNA; note = Related to JACPQM010000002.1; note = Chloroflexi bacterium
ggcaggggagactagtggcctgggcgatgcttcgtcgcccgtggtgcaagactccccgtagaagatcctgcgagctacccgctcgcagtctctccaagcaatcaaagtgagattggaataacggaccatgaaccccctgcccctccttgtgtc

SEQ ID NO: 19085 - RNA, 209 nt, Oceaniradius stylonematis
  source 1..209: mol_type = other RNA; note = Related to QFWV02000004.1
tgcgagttggtatcgcgttcagcttgttcgttgtttcggcgagccgttgttcaggtttggtttgaaggggctcgtggcctaggtcgaagaggncgttttgccggaccttgccgccaaaacgcctcttcgacctaggccacgcgctcaaggcagtcttcacttcaaagactggaagttgctgtagatgccaactcgctcctactacttcc

SEQ ID NO: 19086 - RNA, 208 nt, Pseudooceanicola sp.
  source 1..208: mol_type = other RNA; note = Related to JAGRMS010000295.1
agcgagttggtatcgcgttcagcttgctcgctgcttcggcgagccgttgttcaggttcggtttgaagaggctcgcggcctgagtccaagaggcattttgcccaaggtctcggccaaaatgcctcttggactcaggccgcgcgctcaaggcagtcttcacttcagagactggaagttgctgtagatgccaactcgctcatattacttcc

SEQ ID NO: 19087 - RNA, 208 nt, unidentified
  source 1..208: mol_type = other RNA; note = Related to JAAZTG010000053.1; note = Rhodobacteraceae bacterium R_SAG4
tgcgagttggtatcgcgttcagcttgttcgctgtttcggcgagccgttgttcaggtttggtttgaaggggctcgtggcctaggtcgaagaggcattttgccggaccttgccgccaaaatgcctcttcgacctaggccacgcgctcaaggcagtcttcgtttcaaagactggaagttgctgtagatgccaactcgctcatactacttcc

SEQ ID NO: 19088 - RNA, 208 nt, Phycocomes zhengii
  source 1..208: mol_type = other RNA; note = Related to NZ_QDFI01000072.1
tgcgagttggtatcgcgttcagcttgttcgctgcttcggcgagccgttgttcaggtttggtttgaaggggctcgcggcctaagtccaagaggcattttgcccaaggtctcggccaaaatgcctcttggacttaggccgcgcgctcaaggcagtcttcgcttcagagactggaagttgctgtagatgccaactcgctcatactacttcc

SEQ ID NO: 19089 - RNA, 208 nt, Ciceribacter selenitireducens
  source 1..208: mol_type = other RNA; note = Related to NZ_JAEG01000002.1
agcgagttggtatcgcgttcagcttgttcgctgtttcggcgagccggtgttcaggttcggtttgaagttgctcacggcctagatcgaagaggcattttgcctcaggtcttcgccaaaattcctcttcgacctaggccgcgcgctcaaagcagtcttacattcagagactggaagttgctgtagatgccaactcgctcatattactttc

SEQ ID NO: 19090 - RNA, 208 nt, Bartonella sp.
  source 1..208: mol_type = other RNA; note = Related to JACFOS010000001.1
cgcgagttggcatcatgttcagtttgttcgctgtttcggcgagctgacaatcaggttaggcttgaaagggctcgcggaataggctcgagaggcattatgccgggccttgccgccaaaattcctctcaagcctattccgcgtgctcatggcagtctcatttatcaaggctggaagttactgtagatgccaactcgttcctattattttc

SEQ ID NO: 19091 - RNA, 209 nt, Ochrobactrum sp.
  source 1..209: mol_type = other RNA; note = Related to PCOI01000001.1
cgcgagttggcatcgcacccagcttgttcgctgtttcggcgagcagttcgtcaggttaggtttatagaggctagcggctttggttcgagaggcattttgccggatccgaccgccaaaatccctctcgaaccaaagccgcccgctctaggcagtcttaatattagagactggatcatgctgtaagatgccaactcgctcctactttttcc

SEQ ID NO: 19092 - RNA, 208 nt, Rhodobacter capsulatus
  source 1..208: mol_type = other RNA; note = Related to NZ_AYPY01000034.1
ggcgagttggcgttgcgttcagcttgttcgctgtttcggcgagcagtttttcaggtttggtttgaaggtgctcgcggcctaggttcgagaggcattttgccggaccttgccgccaaaatgcctctcgaacctaggccgcgcgctcaaggcagtcctcactcttcggactggaagttgctgtaaatgccaactcgctcctattacttcc

SEQ ID NO: 19093 - RNA, 208 nt, Tistrella mobilis
  source 1..208: mol_type = other RNA; note = Related to NZ_LPZR01000055.1
cgcgagttggtgtcacgtacagcttgttcgctgtttcggcgagctgttgttcaggttcagtatgaagaagctcgtggcctaggttgaagaggcaccttgccggacctagccgccaatgcgcctcttcaacctagtccacgcgctcaaggcagtcttatctttagagactggaagttgctgtagatgccaactcgctcatattattttc

SEQ ID NO: 19094 - RNA, 208 nt, Agrobacterium tumefaciens
  source 1..208: mol_type = other RNA; note = Related to JAAMCC010000006.1
ggcgagttggtatcgctttcagcttgttcgctgtttcggcgagccggtgatcaggtttggtttgaagaggctcgtggtctaagtccgagaggcaatttgccgaaggctttcgccaaatcgcctctcggacttagaccacgtgctcaaggcagtctcgaatatatagactggaaattgctgtagatgccaactcgctcctactatttcc

SEQ ID NO: 19095 - RNA, 203 nt, Maribius sp.
  source 1..203: mol_type = other RNA; note = Related to NZ_CP045420.1
tgcgggttggcatttaattcggcttgttcgctgtttcggcgagcggaacttcaggttagggttgtaaggtcacgcggatcgggaagaaggctctgtttgccggaccccgccgccaaacagagccttcttcccgatccgcgtgcattaggcagtcataaagactggaactgctgaactcatgccaacccgctcctactatttcc

SEQ ID NO: 19096 - RNA, 200 nt, Pelagimonas varians
  source 1..200: mol_type = other RNA; note = Related to QKMF01000007.1
ggcgggttggctgcaaaatcagattgttcgccgttgcggcgagcaggtaaacaggtcaactatataagggctcgtggattgaaaggaagctccggatttccggatctttccggagatccggagcttcctttcaatccacatgctcaaggcagtcttctggactggaatttctgagatgccaacccgctcctattttttcc

SEQ ID NO: 19097 - RNA, 194 nt, Pararhizobium sp.
  source 1..194: mol_type = other RNA; note = Related to VHLH01000001.1
cgcgggatggcagaattttcgcataggttgctgtttcggcatcctggttttgtggtttggtttataagggctcgcgtttgggggaactcggcaaatttgccgacgagcgccaaattcgccgagttcccccaaacgcgcgcttaagcagtcgtattgactggtatttgcgatgccatcccgcagcttttttctac

SEQ ID NO: 19098 - RNA, 202 nt, Neorhizobium galegae
  source 1..202: mol_type = other RNA; note = Related to VZUL01000002.1
cgcgaggcggtatcggataggaggctgtaccagctgtcctgccatacaggtcaaataatgtaatcgagcgtgtggttagtaaggatcggtcgccaatcggctgaattctcacccaatcaccgaccgatccttactaaccacacattcaaagcaatcttttgaagattggtttttccaatgccgcctcgctcctactacaatg

SEQ ID NO: 19099 - RNA, 200 nt, Rhizobium laguerreae
  source 1..200: mol_type = other RNA; note = Related to JACHXX010000002.1
cgcgaggtggttttggataggaggctgcaccagccgtcctgccattcaggtcaaatagtataagtgggcgcgtgattagtaagggccggtcggcaatcgcctgaagcctcagccaatcaccgaccggcccttactaatcacgcattcaaagcaatcccttgagattggtttttccatgccacctcgcagctactacaacg

SEQ ID NO: 19100 - RNA, 201 nt, Ochrobactrum sp.
  source 1..201: mol_type = other RNA; note = Related to CP061772.1
cgcgaggcggcaacggataggaggctgtaccagctgtcctgccatacaggtaaaatatagtaagacccgcgtgattagtaaggctcggtcggcaatcggctgaactttcacccaatcaccgaccgatccttactaatcacgcattcaaagcaatctttctagagattggtgcttccatgccgcctcgctcctattacaatt

SEQ ID NO: 19101 - RNA, 202 nt, Rhizobium sp.
  source 1..202: mol_type = other RNA; note = Related to JABBGK010000003.1
cgcgaggcggtatcggatagggggctgcaccagccttcctgccattcaggtcaaatagtataaggatcgcgtgagaagtaaggatcggtcagcgattggctgagccttcacccaaccactgaccgatccttacttctcacgcattcaaagcaatcttcttggagattggtttttcccatgccgcctcgctcctactacaaag

SEQ ID NO: 19102 - RNA, 203 nt, Brucella intermedia
  source 1..203: mol_type = other RNA; note = Related to WBWH01000007.1
cgcgaggcggtatcggatagggggctgcaccagccttcctgcctatcaggttaaatattgtaaggatcgcgtgagaagtaaggatcagtcagtgattggctgaaccttcacccaatcactgactgatccttacttctcacgcattcaaagcaatctttttggagattggttttttcctatgccgcctcgctcctattatgtag

SEQ ID NO: 19103 - RNA, 200 nt, Mesorhizobium sp.
  source 1..200: mol_type = other RNA; note = Related to VFUS01000001.1
cgcggggcggcactagataggacactgaatcagtgtcctggctttcaggtcttgcgtgtaaaaaggcgtgctttgtaagagccgctcgagaatggctgcattgcagccacgagcggagttctcgagcgcctcttacaaagcacgcactaagcaatctcaggattggtgttgtcgaatgccgccccgttcttactataatt

SEQ ID NO: 19104 - RNA, 200 nt, Mesorhizobium sp.
  source 1..200: mol_type = other RNA; note = Related to JAIUGX010000003.1
tgcggggcggcatggataggacgctgcatcagcgtcctggttttcaggtcttgcgtgtaaaaggcgcgctttgtaagagccgctcgagaatggctgcatagcagccacgagcggagttctcgagcgcctcttacaaagcacgcactaagcaatctctaggattggtttttgtctaatgccgccccgctcctactacaatt

SEQ ID NO: 19105 - RNA, 191 nt, Pseudohalocynthiibacter aestuariivivens
  source 1..191: mol_type = other RNA; note = Related to NZ_CP049037.1
ggcgaggtggcttggatagggcactgcatcagcgtacctgcccttcaggtcacgctcataagggggtgtggctcatcggagccgctcttgctctgggtaagctttacccaaatcaagatcgcctccgatgagccacacttttaagcaatctaggattggctaaaccatgccacctcgctcctactacattg

SEQ ID NO: 19106 - RNA, 195 nt, Octadecabacter sp.
  source 1..195: mol_type = other RNA; note = Related to DQCL01000311.1
tgcggggtggcttggatagagcgctgcaacagcggctctgcctttcaggtctcccatgtaaggacgtgtgatttgcaagagccggatgcgctttggctggctcccacccaaatcgcatccgtctcttgcaaatcacactttgaagcaatcggtacgagattggccaaaccatgccgccccgctcctactatcttg

SEQ ID NO: 19107 - RNA, 188 nt, Pseudochrobactrum sp.
  source 1..188: mol_type = other RNA; note = Related to NZ_CP080493.1
gacgaggcggtaatttggaggctgtagcagtcttccgggtgtttaggctcaattttgtaagagatcgtgattagtaagagaagaagggcatcgcctgactctcagacaatccccttcttctcttactaatcacgctcttaaagcaatctatgattggtgaaatatgccgcctcgttcttattatcatt

SEQ ID NO: 19108 - RNA, 189 nt, Caulobacter sp.
  source 1..189: mol_type = other RNA; note = Related to NZ_QDKO01000009.1
gtcggggcggcactcacgattggccgctgaagcagcagccataggttttcttggttgggcgtaaagggctcgcggttaggcttctgtcgcgctttcgggcgcagccaaaaccgcgacagaagcctaaccgcgtgctcttaagcaactaatttggttggtaaaacgtgtcgccccgcacctacgacctca
